(19) United States
(12) Patent Application Publication
(10) Pub. No.: US 2026/0002151 A1
(43) Pub. Date: Jan. 1, 2026

(54) COMPOSITIONS AND METHODS FOR THE MODIFICATION AND REGULATION OF LIVER GENE EXPRESSION

(71) Applicant: Mammoth Biosciences, Inc., Brisbane, CA (US)

(72) Inventors: Raymond D. HICKEY, Belmont, CA (US); Sean CHEN, Brisbane, CA (US); Ymer Leif Michael BJORNSON, Gilroy, CA (US); Benjamin Julius RAUCH, San Francisco, CA (US); William Douglass WRIGHT, Fairfield, CA (US); Stepan TYMOSHENKO, Sacramento, CA (US); Wiputra Jaya HARTONO, San Francisco, CA (US); Aaron DELOUGHERY, San Francisco, CA (US); Lucas Benjamin HARRINGTON, San Francisco, CA (US); Lauren Kelli UYESAKA, San Francisco, CA (US)

(73) Assignee: Mammoth Biosciences, Inc., Brisbane, CA (US)

(21) Appl. No.: 19/309,745

(22) Filed: Aug. 26, 2025

Related U.S. Application Data
(63) Continuation of application No. PCT/US2024/017553, filed on Feb. 27, 2024.
(60) Provisional application No. 63/487,259, filed on Feb. 27, 2023.
(60) Provisional application No. 63/487,258, filed on Feb. 27, 2023.
(60) Provisional application No. 63/515,084, filed on Jul. 21, 2023.
(60) Provisional application No. 63/586,918, filed on Sep. 29, 2023.
(60) Provisional application No. 63/616,929, filed on Jan. 2, 2024.

(51) Int. Cl. C12N 15/11; A61P 5/00; C12N 9/22; C12N 9/78; C12N 15/86; C12N 15/88

(52) U.S. Cl. CPC C12N 15/11; A61P 5/00; C12N 9/222; C12N 9/78; C12N 15/86; C12N 15/88; C12Y 305/04002; C07K 2319/00; C12N 2310/20; C12N 2750/14143

(57) ABSTRACT

Provided herein are compositions, systems, and methods for modifying a human APOC3 gene, PCSK9 gene, or ANGPTL3 gene. Systems, compositions, and methods may comprise a CRISPR-associated (Cas) protein or uses thereof. Systems, compositions, and methods of the present disclosure may be useful for treatment of APOC3 associated conditions, including familial chylomicronemia syndrome (FCS) and severe hypertriglyceridemia (SHTG).

### CROSS-REFERENCE TO RELATED APPLICATIONS

[0001] The present application is a continuation of International PCT Application No. PCT/US2024/017553, filed Feb. 27, 2024, which claims priority to U.S. Provisional Application 63/487,258, filed Feb. 27, 2023; U.S. Provisional Application 63/487,259, filed Feb. 27, 2023; U.S. Provisional Application 63/515,084, filed Jul. 21, 2023; U.S. Provisional Application 63/586,918, filed Sep. 29, 2023; U.S. Provisional Application 63/616,929, filed Jan. 2, 2024, the contents each of which are incorporated herein by reference in their entireties.

### SEQUENCE LISTING

[0002] The contents of the electronic sequence listing (MABI_031_04US_SeqList_ST26.xml; Size: 1,953,769 bytes; and Date of Creation: Jun. 13, 2025) are herein incorporated by reference in its entirety.

### BACKGROUND

[0003] Apolipoprotein C3 (APOC3) is a key regulator of plasma triglyceride levels. APOC3 is secreted in the liver and small intestine. APOC3 regulates liver uptake of triglyceride-rich lipoproteins through lipoprotein lipase (LPL)-dependent and LPL-independent mechanisms. It has been suggested that APOC3 may exert pro-atherogenic effects directly by enhancing vessel wall inflammation and indirectly by promoting hypertriglyceridemia. Individuals with loss of function mutations in APOC3 show ˜40% reduction in both triglyceride levels and risk for atherosclerotic cardiovascular disease (ASCVD) compared with non-carriers. Furthermore, epidemiological studies have concluded that APOC3 levels predict risk of ASCVD and cardiovascular mortality.

[0004] Familial chylomicronemia syndrome (FCS) is a rare autosomal recessive disease characterized by the buildup in the blood of fat particles called chylomicrons (chylomicronemia), severe hypertriglyceridemia, and the risk of recurrent and potentially fatal pancreatitis and other complications. It is caused by mutations in the gene encoding LPL or, less frequently, by mutations in genes encoding other proteins necessary for LPL function. People with FCS are at high risk of unpredictable and potentially fatal acute pancreatitis. In addition to pancreatitis, FCS patients are at risk of chronic complications due to permanent organ damage, including chronic pancreatitis and pancreatogenic (Type 3c) diabetes. They can experience daily symptoms including abdominal pain, generalized fatigue and impaired cognition that affect their ability to work. People with FCS also report major emotional and psychosocial effects including anxiety, social withdrawal, depression, and brain fog.

[0005] Severe hypertriglyceridemia (SHTG) is a common condition characterized by high levels of triglycerides in the bloodstream. SHTG (triglyceride levels ≥500 mg/dL) can be caused by diet-derived chylomicronemia and excessive liver triglyceride production, often superimposed on genetic predisposition. Its primary manifestation is acute pancreatitis, particularly if triglyceride levels are >880 mg/dL. A subset of patients with triglyceride levels 500-880 are also at risk for cardiovascular disease. Lowering of plasma triglycerides is desired. Hypertriglyceridemia can lead to conditions including atherosclerosis (hardening of the arteries), obesity, and insulin resistance, which all can contribute to increased risk of cardiovascular disease. SHTG is also a known risk factor for acute pancreatitis, a life-threatening condition.

[0006] Another regulator of plasma triglyceride levels is proprotein convertase subtilisin kexin type 9 (PCSK9). PCSK9 binds to, and degrades, the receptor for low-density lipoprotein particles (LDL). The LDL receptor (LDLR), on liver and other cell membranes, binds and initiates ingestion of LDL-particles from extracellular fluid into cells and targets the complex to lysosomes for destruction. If PCSK9 is blocked or degraded, the LDL-LDLR complex separates during trafficking, with the LDL digested in the lysosome, but the LDLRs instead recycled back to the cell surface and so able to remove additional LDL-particles from the extracellular fluid. Therefore, agents that reduce PCSK9 may lower LDL particle concentrations.

[0007] A third regulator of plasma triglyceride levels is Angiopoietin-like 3 (ANGPTL3). ANGPTL3 acts as a dual inhibitor of lipoprotein lipase and endothelial lipase thereby increasing plasma triglyceride, LDL cholesterol and HDL cholesterol in mice and humans. Therefore, agents that reduce ANGPTL3 may lower LDL particle concentrations.

### SUMMARY

[0008] The present disclosure provides systems and compositions for modifying APOC3, PCSK9, and ANGPTL3, and uses thereof. Such systems and compositions generally comprise guide nucleic acids and CRISPR associated (Cas) proteins to reduce or abolish expression of the APOC3, PCSK9, or ANGPTL3 protein. Compositions, systems, and methods disclosed herein may leverage nucleic acid modifying activities. Nucleic acid modifying activities may include, by way of non-limiting example, cis cleavage activity, nickase activity, and nucleobase modifying activity.

[0009] In some aspects, disclosed herein is a composition or system comprising a guide ribonucleic acid (RNA) or a polynucleotide encoding the same, wherein the guide RNA comprises (a) a first region comprising a protein binding sequence, and (b) a second region comprising a targeting sequence that is complementary to a target sequence that is within an APOC3 gene, wherein the targeting sequence comprises a nucleotide sequence that is at least 70%, at least 75%, at least 80%, at least 85%, at least 90%, at least 95% or 100% identical to any one of SEQ ID NOs: 1-15, 67-72, 207, 209-299, 804-805, 823-825, 830-1399, 2018-2026, and 2084-2086. In some embodiments, the targeting sequence is selected from SEQ ID NOs: 1-15, 67-72, 207, 209-299, 804-805, 823-825, 830-1399, 2018-2026, and 2084-2086. In some embodiments, the targeting sequence comprises a nucleotide sequence that is at least 70%, at least 75%, at least 80%, at least 85%, at least 90%, at least 95% or 100% identical to any one of SEQ ID NOs: 1-15, 67-72, 207, 804-805, and 830-999, and the protein binding sequence comprises a nucleotide sequence that is at least 70%, at least 75%, at least 80%, at least 85%, at least 90%, at least 95% or 100% identical to any one of SEQ ID NOs: 16 and 38-43. In some embodiments, the composition or system comprises an effector protein or a nucleic acid encoding the same, wherein the effector protein comprises an amino acid sequence that is at least 70%, at least 75%, at least 80%, at least 85%, at least 90%, at least 95%, at least 97%, at least 98%, at least 99%, or 100% identical to any one of SEQ ID NOs: 32, 34, 794, or 2090. In some embodiments, the effector protein comprises an amino acid alteration relative to SEQ ID NO: 32 as described in TABLE 18 or TABLE 19.

[0010] In some embodiments, the guide RNA comprises a nucleotide sequence that is at least 70%, at least 75%, at least 80%, at least 85%, at least 90%, at least 95% or 100% identical to any one of SEQ ID NOs: 17-31, 73-78, 491, 815-816, and 1400-1569. In some embodiments, the targeting sequence comprises a nucleotide sequence that is at least 70%, at least 75%, at least 80%, at least 85%, at least 90%, at least 95% or 100% identical to any one of SEQ ID NOs: 209-299, 823-825, 1000-1399, 2018-2026, and 2084-2086, and the protein binding sequence comprises a nucleotide sequence that is at least 70%, at least 75%, at least 80%, at least 85%, at least 90%, at least 95% or 100% identical to SEQ ID NO: 488. In some embodiments, the protein binding sequence further comprises a nucleotide sequence that is at least 70%, at least 75%, at least 80%, at least 85%, at least 90%, at least 95% or 100% identical to SEQ ID NOs: 489 or 490. In some embodiments, the composition or system comprises an effector protein or a nucleic acid encoding the same, wherein the effector protein comprises an amino acid sequence that is at least 70%, at least 75%, at least 80%, at least 85%, at least 90%, at least 95%, at least 97%, at least 98%, at least 99%, or 100% identical to any one of SEQ ID NOs: 773, 775, or 793. In some embodiments, the effector protein comprises an amino acid alteration relative to SEQ ID NO: 773 as described in TABLE 16 or TABLE 17. In some embodiments, the guide RNA comprises a nucleotide sequence that is at least 70%, at least 75%, at least 80%, at least 85%, at least 90%, at least 95%, or 100% identical to any one of SEQ ID NOs: 494-584, 826-828, 1570-1969, 2075-2083, and 2087-2089.

[0011] In some embodiments, the first region comprises a nucleotide sequence that is at least 70%, at least 75%, at least 80%, at least 85%, at least 90%, at least 95%, or 100% identical to SEQ ID NO: 39, and a second region comprising a nucleotide sequence that is at least 70%, at least 75%, at least 80%, at least 85%, at least 90%, at least 95%, or 100% identical to SEQ ID NO: 10. In some embodiments, the guide RNA comprises a nucleotide sequence that is at least 70%, at least 75%, at least 80%, at least 85%, at least 90%, at least 95%, or 100% identical to SEQ ID NO: 26.

[0012] In some embodiments, the first region comprises a nucleotide sequence that is at least 70%, at least 75%, at least 80%, at least 85%, at least 90%, at least 95%, or 100% identical to SEQ ID NO: 39, and a second region comprising a nucleotide sequence that is at least 70%, at least 75%, at least 80%, at least 85%, at least 90%, at least 95%, or 100% identical to SEQ ID NO: 71. In some embodiments, the guide RNA comprises a nucleotide that is at least 70%, at least 75%, at least 80%, at least 85%, at least 90%, at least 95%, or 100% identical to SEQ ID NO: 77. In some embodiments, the composition or system further comprises an effector protein or a nucleic acid encoding the same, wherein the effector protein comprises an amino acid sequence at least 70%, at least 75%, at least 80%, at least 85%, at least 90%, at least 95%, or 100% identical to any one of SEQ ID NOs: 32, 34, 794, or 2090.

[0013] In some embodiments, the nucleic acid encoding the effector protein comprises a messenger RNA. In some embodiments, the effector protein is fused to a fusion partner protein or wherein the nucleic acid encoding the effector protein encodes a fusion partner protein that is fused to the effector protein upon expression of the nucleic acid. In some embodiments, the fusion partner protein comprises an enzymatic activity is selected from reverse transcriptase activity, deaminase activity, and methyltransferase activity. In some embodiments, the composition or system further comprises a lipid nanoparticle (LNP), wherein the LNP contains the guide nucleic acid, and optionally, the effector protein or nucleic acid encoding the same.

[0014] In some aspects, disclosed herein is a composition or system comprising an expression cassette comprising, from 5′ to 3′: (a) a first inverted terminal repeat (ITR); (b) a first promoter sequence operably linked to a nucleic acid sequence encoding a guide RNA wherein the guide RNA comprises: (i) a first region comprising a protein binding sequence; and (ii) a second region comprising a spacer sequence that is complementary to a target sequence of an APOC3 gene, wherein the spacer sequence is at least 70%, at least 75%, at least 80%, at least 85%, at least 90%, at least 95%, or 100% identical to any one of SEQ ID NOs: 1-15, 67-72, 207, 209-299, 804-805, 823-825, 830-1399, 2018-2026, and 2084-2086; (c) a second promoter sequence operably linked to a nucleic acid sequence encoding an effector protein, wherein the effector protein comprises an amino acid sequence that is at least 70%, at least 75%, at least 80%, at least 85%, at least 90%, at least 95%, or 100% identical to an amino acid sequence selected from SEQ ID NOs: 32 and 773; (d) a poly(A) signal; and (e) a second ITR. In some embodiments, the expression cassette is an adeno-associated virus (AAV) vector or portion thereof.

[0015] In some aspects, disclosed herein is a pharmaceutical composition comprising the composition of any one of the above aspects or embodiments, and a pharmaceutical acceptable excipient or carrier.

[0016] In some aspects, disclosed herein is method of modifying an APOC3 gene, comprising contacting the APOC3 gene, with the composition or system of any one of the above aspects or embodiments. In some embodiments, modifying the APOC3 gene reduces the expression of the APOC3 gene. In some embodiments, modifying the APOC3 gene permanently reduces the expression of the APOC3 gene. In some embodiments, modifying the APOC3 gene comprises cleaving at least one strand of the APOC3 gene. In some embodiments, modifying the APOC3 gene is in vivo. In some embodiments, modifying the APOC3 gene is in the liver.

[0017] In some aspects, disclosed herein is a method of lowering triglycerides in a mammal with hypertriglyceridemia, the method comprising delivering a composition to the mammal, wherein the composition comprises: (a) a guide nucleic acid comprising a nucleotide sequence that is at least 70%, at least 75%, at least 80%, at least 85%, at least 90%, at least 95%, or 100% identical to a nucleotide sequence selected from any one of SEQ ID NOs: 1-31, 38-43, 67-202, 207-772, 779-820, and 820-2089 and (b) an effector protein or nucleic acid encoding the same, wherein the effector protein comprises an amino acid sequence that is at least 70%, at least 75%, at least 80%, at least 85%, at least 90%, at least 95%, or 100% identical to a nucleotide sequence selected from any one of SEQ ID NOs: 32 and 773. In some embodiments, the guide nucleic acid and the effector protein or nucleic acid encoding the same are delivered in an LNP.

[0018] In some aspects, disclosed herein is a method of treating or preventing a disease in a subject in need thereof, comprising administering the composition or system of any one of the above aspects or embodiments. In some embodiments, the disease is selected from cardiovascular disease, familial chylomicronemia syndrome, and hypertriglyceridemia.

[0019] In some aspects, disclosed herein is a cell, or population of cells, comprising, or modified by, the composition, system, or method of any one of the above aspects or embodiments. In some embodiments, the cell is a human cell.

### INCORPORATION BY REFERENCE

[0020] All publications, patents, and patent applications mentioned in this specification are herein incorporated by reference to the same extent as if each individual publication, patent, or patent application was specifically and individually indicated to be incorporated by reference.

### BRIEF DESCRIPTION OF THE DRAWINGS

[0021] FIG. 1 shows editing of APOC3 in a human liver cell line as measured by % indel with CasPhi.12 L26R and various guide nucleic acids comprising a spacer sequence complementary to a target sequence in APOC3.

[0022] FIG. 2 shows editing of APOC3 in a human liver cell line as measured by % indel (left column) and reduction of APOC3 protein (right column) by CasPhi.12 L26R or CasM.265466 D220R and various guide nucleic acids comprising a spacer sequence complementary to a target sequence in APOC3.

[0023] FIG. 3A-FIG. 3C show editing of APOC3 with CasPhi.12 L26R in primary monkey hepatocytes from three different donors: Donor 1 (FIG. 3A), Donor 2 (FIG. 3B), and Donor 3 (FIG. 3C). For each guide, the column on the left is the percent indel formation with 200 ng of the guide RNA and the column on right is the percent indel formation with 50 ng of the guide RNA.

[0024] FIG. 4 shows editing of APOC3 with CasPhi.12 L26R and CasM.265466 D220R in primary monkey hepatocytes.

[0025] FIG. 5A-FIG. 5B show editing of APOC3 in a human liver cell line as measured by % indel with CasPhi.12 L26R or CasM.265466 and various guide nucleic acids comprising a spacer sequence complementary to a target sequence in APOC3. Guides R15579 and R15578 were paired with SpyCas9; guides R17561, R17562, R17563, R17564, R17565, R17566, R15592, and R15595 were paired with CasPhi.12; and the rest of the guides were paired with CasM.265466.

[0026] FIG. 6 shows editing of APOC3 and reduction of APOC3 protein in a human liver cell line as measured by % indel with CasPhi.12 L26R or CasM.265466 and various guide nucleic acids comprising a spacer sequence complementary to a target sequence in APOC3. Guide R15579 was paired with SpyCas9; guides R15592, R15595, R17561, R17562, R17563, R17564, R17566, and R17567 were paired with CasPhi.12; and the rest of the guides were paired with CasM.265466.

[0027] FIG. 7 shows that CasPhi.12 L26R can edit APOC3 across multiple NHP and human cell lines, wherein lighter color in the grey-scale heat map is indicative of indel formation.

[0028] FIG. 8 shows CasPhi.12 and CasM.265466 edit APOC3 in fibroblasts of hAPOC3 transgenic mice. Guide R15579 was paired with SpyCas9; guides R15592, R15595, R17561, R17562, R17563, R17566, and R17567 were paired with CasPhi.12; and the rest of the guides were paired with CasM.265466.

[0029] FIG. 9 shows that an mRNA encoding a CasPhi.12 variant can be delivered to a mouse via LNP can edit a gene in liver.

[0030] FIG. 10A shows that a CasM.265466 D220R/E335Q deaminase fusion protein can modify a nucleobase of APOC3, PCSK9, and ANGPTL3.

[0031] FIG. 10B shows that a CasPhi.12 L26R/E567Q deaminase fusion protein can modify a nucleobase of APOC3, PCSK9, and ANGPTL3. The bar to the left represents mean non-target strand ABE editing percent, and the bar to the right represents mean target position editing.

[0032] FIG. 11 shows that CasPhi.12 L26R and CasM.265466 D220R reduce human APOC3 protein in the livers of humanized APOC3 mice with severe hypertriglyceridemia and hypercholesterolemia.

[0033] FIG. 12 shows that CasPhi.12 L26R and CasM.265466 D220R reduce circulating triglycerides in humanized APOC3 mice with severe hypertriglyceridemia and hypercholesterolemia. The guide IDs shown in the legend from top to bottom correspond to the data points in the graphs from left to right.

[0034] FIG. 13 shows that CasPhi.12 variant L26R/I471T and various guide nucleic acids reduce human APOC3 protein in the livers of humanized APOC3 mice with severe hypertriglyceridemia and hypercholesterolemia.

[0035] FIG. 14A-FIG. 14D show that CasPhi.12 variant L26R/I471T reduces circulating triglycerides (FIG. 14B), LDL cholesterol (FIG. 14D), HDL cholesterol (FIG. 14C), and total cholesterol (FIG. 14A) in humanized APOC3 mice with severe hypertriglyceridemia and hypercholesterolemia. The guide IDs shown in the legend from top to bottom correspond to the data points in the graphs from left to right.

### DETAILED DESCRIPTION OF THE INVENTION

[0036] It is to be understood that both the foregoing general description and the following detailed description are exemplary, and explanatory only, and are not restrictive of the disclosure.

[0037] The section headings used herein are for organizational purposes only and are not to be construed as limiting the subject matter described.

[0038] All documents, or portions of documents, cited in this application, including, but not limited to, patents, patent applications, articles, books, and treatises, are hereby expressly incorporated by reference in their entirety for any purpose.

### 1. Definitions

[0039] Unless otherwise indicated, all technical terms used herein have the same meaning as commonly understood by one of ordinary skill in the art to which this invention belongs. Unless otherwise indicated or obvious from context, the following terms have the following meanings:

[0040] The terms, “a,” “an,” and “the,” as used herein, include plural references unless the context clearly dictates otherwise.

[0041] The terms, “or” and “and/or,” as used herein, include any, and all, combinations of one or more of the associated listed items.

[0042] The terms, “including,” “includes,” “included,” and other forms, are not limiting.

[0043] The terms, “comprise” and its grammatical equivalents, as used herein, specify the presence of stated features, integers, steps, operations, elements, and/or components, but do not preclude the presence or addition of one or more other features, integers, steps, operations, elements, components, and/or groups thereof.

[0044] The term, “about,” as used herein in reference to a number or range of numbers, is understood to mean the stated number and numbers+/−10% thereof, or 10% below the lower listed limit and 10% above the higher listed limit for the values listed for a range.

[0045] The terms, “% identical,” “% identity,” and “percent identity,” or grammatical equivalents thereof, refer to the extent to which two sequences (nucleotide or amino acid) have the same residue at the same positions in an alignment. For example, “an amino acid sequence is X % identical to SEQ ID NO: Y” can refer to % identity of the amino acid sequence to SEQ ID NO: Y and is elaborated as X % of residues in the amino acid sequence are identical to the residues of sequence disclosed in SEQ ID NO: Y. Generally, computer programs can be employed for such calculations. Illustrative programs that compare and align pairs of sequences, include ALIGN (Myers and Miller, Comput Appl Biosci. 1988 March; 4(1):11-7), FASTA (Pearson and Lipman, Proc Natl Acad Sci USA. 1988 April; 85(8):2444-8; Pearson, Methods Enzymol. 1990; 183:63-98) and gapped BLAST (Altschul et al., Nucleic Acids Res. 1997 Sep. 1; 25(17):3389-40), BLASTP, BLASTN, or GCG.

[0046] The term “base editing enzyme,” as used herein, refers to a protein, polypeptide or fragment thereof that is capable of catalyzing the chemical modification of a nucleobase of a deoxyribonucleotide or a ribonucleotide. Such a base editing enzyme, for example, is capable of catalyzing a reaction that modifies a nucleobase that is present in a nucleic acid molecule, such as DNA or RNA (single stranded or double stranded). Non-limiting examples of the type of modification that a base editing enzyme is capable of catalyzing includes converting an existing nucleobase to a different nucleobase, such as converting a cytosine to a guanine or thymine or converting an adenine to a guanine, hydrolytic deamination of an adenine or adenosine, or methylation of cytosine (e.g., CpG, CpA, CpT or CpC). A base editing enzyme itself may or may not bind to the nucleic acid molecule containing the nucleobase.

[0047] The term “base editor,” as used herein, refers to a fusion protein comprising a base editing enzyme linked to an effector protein. The base editing enzyme may be referred to as a fusion partner. The base editing enzyme can differ from a naturally occurring base editing enzyme. It is understood that any reference to a base editing enzyme herein also refers to a base editing enzyme variant. The base editor is functional when the effector protein is coupled to a guide nucleic acid. The guide nucleic acid imparts sequence specific activity to the base editor. By way of non-limiting example, the effector protein may comprise a catalytically inactive effector protein. Also, by way of non-limiting example, the base editing enzyme may comprise deaminase activity. Additional base editors are described herein.

[0048] The term “catalytically inactive effector protein,” also referred to as a “dCas” protein, as used herein, refers to an effector protein that is modified relative to a naturally-occurring effector protein to have a reduced or eliminated catalytic activity relative to that of the naturally-occurring effector protein, but retains its ability to interact with a guide nucleic acid. The catalytic activity that is reduced or eliminated is often a nuclease activity. The naturally-occurring effector protein may be a wildtype protein. In some embodiments, the catalytically inactive effector protein is referred to as a catalytically inactive variant of an effector protein, e.g., a Cas effector protein. In some embodiments, the catalytically inactive effector protein is referred to as a dead Cas protein or a dCas protein.

[0049] The term “cis cleavage,” as used herein, refers to cleavage (hydrolysis of a phosphodiester bond) of a target nucleic acid by an effector protein complexed with a guide nucleic acid (e.g., an RNP complex), wherein at least a portion of the guide nucleic acid is hybridized to at least a portion of the target nucleic acid. Cleavage may occur within or directly adjacent to the region of the target nucleic acid that is hybridized to the guide nucleic acid.

[0050] The terms “complementary” and “complementarity,” as used herein, with reference to a nucleic acid molecule or nucleotide sequence, refer to the characteristic of a polynucleotide having nucleotides that base pair with their Watson-Crick counterparts (C with G; or A with T or U) in a reference nucleic acid. For example, when every nucleotide in a polynucleotide forms a base pair with a reference nucleic acid, that polynucleotide is said to be 100% complementary to the reference nucleic acid. In a double stranded DNA or RNA sequence, the upper (sense) strand sequence is in general, understood as going in the direction from its 5′- to 3′-end, and the complementary sequence is thus understood as the sequence of the lower (antisense) strand in the same direction as the upper strand. Following the same logic, the reverse sequence is understood as the sequence of the upper strand in the direction from its 3′- to its 5′-end, while the ‘reverse complement’ sequence or the ‘reverse complementary’ sequence is understood as the sequence of the lower strand in the direction of its 5′- to its 3′-end. Each nucleotide in a double stranded DNA or RNA molecule that is paired with its Watson-Crick counterpart called its complementary nucleotide.

[0051] The term “cleavage assay,” as used herein, refers to an assay designed to visualize, quantitate, or identify cleavage of a nucleic acid. In some cases, the cleavage activity may be cis-cleavage activity. In some cases, the cleavage activity may be trans-cleavage activity.

[0052] The terms “cleave,” “cleaving,” and “cleavage,” as used herein, with reference to a nucleic acid molecule or nuclease activity of an effector protein, refer to the hydrolysis of a phosphodiester bond of a nucleic acid molecule that results in breakage of that bond. The result of this breakage can be a nick (hydrolysis of a single phosphodiester bond on one side of a double-stranded molecule), single strand break (hydrolysis of a single phosphodiester bond on a single-stranded molecule) or double strand break (hydrolysis of two phosphodiester bonds on both sides of a double-stranded molecule) depending upon whether the nucleic acid molecule is single-stranded (e.g., ssDNA or ssRNA) or double-stranded (e.g., dsDNA) and the type of nuclease activity being catalyzed by the effector protein.

[0053] The term “clustered regularly interspaced short palindromic repeats (CRISPR),” as used herein, refers to a segment of DNA found in the genomes of certain prokaryotic organisms, including some bacteria and archaea, that includes repeated short sequences of nucleotides interspersed at regular intervals between unique sequences of nucleotides derived from the DNA of a pathogen (e.g., virus) that had previously infected the organism and that functions to protect the organism against future infections by the same pathogen.

[0054] The terms “CRISPR RNA” or “crRNA,” as used herein, refer to a type of guide nucleic acid, wherein the nucleic acid is RNA comprising a first sequence that is capable of interacting with an effector protein either directly (by being bound by an effector protein) or indirectly (e.g., by hybridization with a second nucleic acid molecule that can be bound by an effector, such as a tracrRNA); and a second sequence that hybridizes to a target sequence of a target nucleic acid. In some embodiments, the first sequence is referred to as a repeat sequence and the second sequence is referred to as a spacer sequence. The first sequence and the second sequence are directly connected to each other or by a linker.

[0055] The term, “detectable signal,” as used herein, refers to a signal that can be detected using optical, fluorescent, chemiluminescent, electrochemical and other detection methods known in the art.

[0056] The term, “disrupt,” as used herein, refers to reducing or abolishing a function of a gene regulatory element by altering or modifying the nucleotide sequence of the gene regulatory element or the nucleotide sequence located in proximity (e.g., less than 200 linked nucleotides) to the gene regulatory element. In some embodiments, the gene regulatory element is a splicing-regulatory element. In some embodiments, the original function of the gene regulatory element is repressing exonic splicing. In some embodiments, there is an increased inclusion of an exon region in a mature mRNA after the disruption.

[0057] The term, “donor nucleic acid,” as used herein, refers to a nucleic acid that is (designed or intended to be) incorporated into a target nucleic acid or target sequence.

[0058] The term “dual nucleic acid system” as used herein refers to a system that uses a transactivated or transactivating RNA-crRNA duplex complexed with one or more polypeptides described herein, wherein the complex is capable of interacting with a target nucleic acid in a sequence selective manner.

[0059] The term “effector protein,” as used herein, refers to a protein, polypeptide, or peptide that is capable of interacting with a guide nucleic acid to form a complex (e.g., a RNP complex), wherein the complex interacts with a target nucleic acid. A complex between an effector protein and a guide nucleic acid can include multiple effector proteins or a single effector protein. In some embodiments, the effector protein modifies the target nucleic acid when the complex contacts the target nucleic acid. In some embodiments, the effector protein does not modify the target nucleic acid, but it is linked to a fusion partner protein that modifies the target nucleic acid when the complex contacts the target nucleic acid. A non-limiting example of an effector protein modifying a target nucleic acid is cleaving of a phosphodiester bond of the target nucleic acid. Additional examples of modifications an effector protein can make to target nucleic acids are described herein and throughout. Herein, reference to an effector protein includes reference to a nucleic acid encoding the effector protein, unless indicated otherwise.

[0060] The term, “engineered modification,” as used herein, refers to a structural change of one or more nucleic acid residues of a nucleotide sequence or one or more amino acid residue of an amino acid sequence, such as chemical modification of one or more nucleobases; or a chemical change to the phosphate backbone, a nucleotide, a nucleobase, or a nucleoside. Such modifications can be made to an effector protein amino acid sequence or guide nucleic acid nucleotide sequence, or any sequence disclosed herein (e.g., a nucleic acid encoding an effector protein or a nucleic acid that encodes a guide nucleic acid). Methods of modifying a nucleic acid or amino acid sequence are known. One of ordinary skill in the art will appreciate that the engineered modification(s) may be located at any position(s) of a nucleic acid such that the function of the nucleic acid, protein, composition, or system is not substantially decreased. Nucleic acids provided herein can be prepared according to any available technique including, but not limited to chemical synthesis, enzymatic synthesis, which is generally termed in vitro-transcription, cloning, enzymatic, or chemical cleavage, etc. In some embodiments, the nucleic acids provided herein are not uniformly modified along the entire length of the molecule. Different nucleotide modifications and/or backbone structures can exist at various positions within the nucleic acid.

[0061] An “expression cassette” comprises a DNA coding sequence operably linked to a promoter. “Operably linked” refers to a juxtaposition wherein the components so described are in a relationship permitting them to function in their intended manner. For instance, a promoter is operably linked to a coding sequence (or the coding sequence can also be said to be operably linked to the promoter) if the promoter affects its transcription or expression.

[0062] The terms “fusion protein,” or “fusion effector protein,” as used herein, refer to a protein comprising at least two heterologous polypeptides. The fusion protein may comprise one or more effector proteins and fusion partners. In some embodiments, an effector protein and fusion partner are not found connected to one another as a native protein or complex that occurs together in nature.

[0063] The term “functional domain,” as used herein, refers to a region of one or more amino acids in a protein that is required for an activity of the protein, or the full extent of that activity, as measured in an in vitro assay. Activities include, but are not limited to nucleic acid binding, nucleic acid modification, nucleic acid cleavage, protein binding. The absence of the functional domain, including mutations of the functional domain, would abolish or reduce activity.

[0064] The term, “genetic disease,” as used herein, refers to a disease, disorder, condition, or syndrome associated with or caused by one or more mutations in the DNA of an organism having the genetic disease.

[0065] The term “guide nucleic acid,” as used herein, refers to a nucleic acid comprising: a first nucleotide sequence that is capable of being non-covalently bound by an effector protein; and a second nucleotide sequence that hybridizes to a target nucleic acid. When in a complex with one or more polypeptides described herein (e.g., an RNP complex), a guide nucleic acid can impart sequence selectivity to the complex when the complex interacts with a target nucleic acid. The first sequence may be referred to herein as a repeat sequence. The second sequence may be referred to herein as a spacer sequence. The term, “guide nucleic acid,” may be used interchangeably herein with the term “guide RNA” (gRNA) however it is understood that guide nucleic acids may comprise deoxyribonucleotides (DNA), ribonucleotides (RNA), a combination thereof (e.g., RNA with a thymine base), biochemically or chemically modified nucleobases (e.g., one or more engineered modifications described herein), or combinations thereof.

[0066] The term, “handle sequence,” as used herein, refers to a sequence of nucleotides in a single guide RNA (sgRNA), that is: 1) capable of being non-covalently bound by an effector protein and 2) connects the portion of the sgRNA capable of being non-covalently bound by an effector protein to a nucleotide sequence that is hybridizable to a target nucleic acid. In general, the handle sequence comprises an intermediary RNA sequence, that is capable of being non-covalently bound by an effector protein. In some embodiments, the handle sequence further comprises a repeat sequence. In such embodiments, the intermediary RNA sequence or a combination of the intermediary RNA and the repeat sequence is capable of being non-covalently bound by an effector protein.

[0067] The term “heterologous,” as used herein, means a nucleotide or polypeptide sequence that is not found in a native nucleic acid or protein, respectively. In some embodiments, fusion proteins comprise an effector protein and a fusion partner protein, wherein the fusion partner protein is heterologous to an effector protein. These fusion proteins may be referred to as a “heterologous protein.” A protein that is heterologous to the effector protein is a protein that is not covalently linked via an amide bond to the effector protein in nature. In some embodiments, a heterologous protein is not encoded by a species that encodes the effector protein. In some embodiments, the heterologous protein exhibits an activity (e.g., enzymatic activity) when it is linked to the effector protein. In some embodiments, the heterologous protein exhibits increased or reduced activity (e.g., enzymatic activity) when it is linked to the effector protein, relative to when it is not linked to the effector protein. In some embodiments, the heterologous protein exhibits an activity (e.g., enzymatic activity) that it does not exhibit when it is linked to the effector protein. A guide nucleic acid may comprise a first sequence and a second sequence, wherein the first sequence and the second sequence are not found covalently linked via a phosphodiester bond in nature. Thus, the first sequence is considered to be heterologous with the second sequence, and the guide nucleic acid may be referred to as a heterologous guide nucleic acid.

[0068] The terms, “intermediary RNA,” “intermediary RNA sequence,” and “intermediary sequence” as used herein, in a context of a single nucleic acid system, refers to a nucleotide sequence in a handle sequence, wherein the intermediary RNA sequence is capable of, at least partially, being non-covalently bound to an effector protein to form a complex (e.g., an RNP complex). An intermediary RNA sequence is not a transactivating nucleic acid in systems, methods, and compositions described herein.

[0069] The term “linked” when used in reference to biopolymers (e.g., nucleic acids, polypeptides) refers to being covalently connected. In some embodiments, two polymers are linked by at least a covalent bond. In some embodiments, two nucleic acids are linked by at least one nucleotide. In some embodiments, two nucleic acids are linked by at least one amino acid. The terms “fused” and “linked” are used interchangeably herein.

[0070] The term “linker,” as used herein, refers to a covalent bond or molecule that links a first polypeptide to a second polypeptide (e.g., by an amide bond, or one or more amino acids) or a first nucleic acid to a second nucleic acid (e.g., by a phosphodiester bond, or one or more nucleotides).

[0071] The term “modified target nucleic acid,” as used herein, refers to a target nucleic acid, wherein the target nucleic acid has undergone a modification, for example, after contact with an effector protein. In some cases, the modification is an alteration in the sequence of the target nucleic acid. In some cases, the modified target nucleic acid comprises an insertion, deletion, or replacement of one or more nucleotides compared to the unmodified target nucleic acid.

[0072] The terms “non-naturally occurring” and “engineered,” as used herein, are used interchangeably and indicate the involvement of the hand of man. The terms, when referring to a nucleic acid, nucleotide, protein, polypeptide, peptide or amino acid, refer to a nucleic acid, nucleotide, protein, polypeptide, peptide or amino acid that is at least substantially free from at least one other feature with which it is naturally associated in nature and as found in nature, and/or contains a modification (e.g., chemical modification, nucleotide sequence, or amino acid sequence) that is not present in the naturally occurring nucleic acid, nucleotide, protein, polypeptide, peptide, or amino acid. The terms, when referring to a composition or system described herein, refer to a composition or system having at least one component that is not naturally associated with the other components of the composition or system. By way of a non-limiting example, a composition may include an effector protein and a guide nucleic acid that do not naturally occur together. Conversely, and as a non-limiting further clarifying example, an effector protein or guide nucleic acid that is “natural,” “naturally-occurring,” or “found in nature” includes an effector protein and a guide nucleic acid from a cell or organism that have not been genetically modified by the hand of man.

[0073] The term “nucleic acid expression vector,” as used herein, refers to a nucleic acid that can be used to express a nucleic acid of interest.

[0074] The term “nuclear localization signal (NLS),” as used herein, refers to an entity (e.g., peptide) that facilitates localization of a nucleic acid, protein, or small molecule to the nucleus, when present in a cell that contains a nuclear compartment.

[0075] The term “nuclease activity,” as used herein, refers to the catalytic activity that results in nucleic acid cleavage (e.g., ribonuclease activity (ribonucleic acid cleavage), or deoxyribonuclease activity (deoxyribonucleic acid cleavage), etc.).

[0076] The terms “partner protein,” “fusion partner,” or “fusion partner protein” as used herein, refer to a protein, polypeptide or peptide that is linked to an effector protein or capable of being proximal to an effector protein. In some embodiments, a fusion partner that is capable of being proximal to an effector protein is a fusion partner that is capable of binding a guide nucleic acid, wherein the effector protein is also capable of binding the guide nucleic acid. In some embodiments, a fusion partner directly interacts with (e.g., binds to/by) an effector protein. In some embodiments, a fusion partner indirectly interacts with an effector protein (e.g., through another protein or moiety).

[0077] The term “pharmaceutically acceptable excipient, carrier or diluent,” as used herein, refers to any substance formulated alongside the active ingredient of a pharmaceutical composition that allows the active ingredient to retain biological activity and is non-reactive with the subject's immune system. Such a substance can be included for the purpose of long-term stabilization, bulking up solid formulations that contain potent active ingredients in small amounts, or to confer a therapeutic enhancement on the active ingredient in the final dosage form, such as facilitating absorption, reducing viscosity, or enhancing solubility. The selection of appropriate substance can depend upon the route of administration and the dosage form, as well as the active ingredient and other factors. Compositions having such substances can be formulated by well-known conventional methods (see, e.g., Remington, The Science and Practice of Pharmacy 23^{rd} edition, A. Adejare, ed., Elsevier Publishing Co., 2020).

[0078] The terms, “promoter” and “promoter sequence,” as used herein, refer to a DNA regulatory region capable of binding RNA polymerase and initiating transcription of a downstream (3′ direction) coding or non-coding sequence. A transcription initiation site, as well as protein binding domains responsible for the binding of RNA polymerase, can also be found in a promoter region. Eukaryotic promoters will often, but not always, contain “TATA” boxes and “CAT” boxes. Various promoters, including inducible promoters, may be used to drive expression by the various vectors of the present disclosure.

[0079] The term “protospacer adjacent motif” and “PAM,” as used herein, refers to a nucleotide sequence found in a target nucleic acid that directs an effector protein to modify the target nucleic acid at a specific location. In some embodiments, a PAM sequence is required for a complex of an effector protein and a guide nucleic acid (e.g., an RNP complex) to hybridize to and edit the target nucleic acid. In some embodiments, the complex does not require a PAM to edit the target nucleic acid.

[0080] In some embodiments, the term “region” as used herein may be used to describe a portion of, or all of, a corresponding sequence, for example, a spacer region is understood to comprise a portion of or all of a spacer sequence.

[0081] The term, “regulatory element,” used herein, refers to transcriptional and translational control sequences, such as promoters, enhancers, polyadenylation signals, terminators, protein degradation signals, and the like, that provide for and/or regulate transcription of a non-coding sequence (e.g., a guide nucleic acid) or a coding sequence (e.g., effector proteins, fusion proteins, and the like) and/or regulate translation of an encoded polypeptide.

[0082] The term, “repeat sequence,” as used herein, refers to a sequence of nucleotides in a guide nucleic acid that is capable of, at least partially, interacting with an effector protein.

[0083] The terms, “ribonucleotide protein complex” and “RNP” as used herein, refer to a complex of one or more nucleic acids and one or more polypeptides described herein. While the term utilizes “ribonucleotides” it is understood that the one or more nucleic acid may comprise deoxyribonucleotides (DNA), ribonucleotides (RNA), a combination thereof (e.g., RNA with a thymine base), biochemically or chemically modified nucleobases (e.g., one or more engineered modifications described herein), or combinations thereof.

[0084] The terms, “RuvC” and “RuvC domain,” as used herein, refer to a region of an effector protein that is capable of cleaving a target nucleic acid, and in certain embodiments, of processing a pre-crRNA. In some embodiments, the RuvC domain is located near the C-terminus of the effector protein. A single RuvC domain may comprise RuvC subdomains, for example a RuvCI subdomain, a RuvCII subdomain and a RuvCIII subdomain. The term “RuvC” domain can also refer to a “RuvC-like” domain. Various RuvC-like domains are known in the art and are easily identified using online tools such as InterPro (ebi.ac.uk/interpro/). For example, a RuvC-like domain may be a domain which shares homology with a region of TnpB proteins of the IS605 and other related families of transposons

[0085] The term “sample,” as used herein, generally refers to something comprising a target nucleic acid. In some embodiments, the sample is a biological sample, such as a biological fluid or tissue sample. In some embodiments, the sample is an environmental sample. The sample may be a biological sample or environmental sample that is modified or manipulated. By way of non-limiting example, samples may be modified or manipulated with purification techniques, heat, nucleic acid amplification, salts, and buffers.

[0086] The terms, “single guide nucleic acid”, “single guide RNA” and “sgRNA,” as used herein, in the context of a single nucleic acid system, refers to a guide nucleic acid, wherein the guide nucleic acid is a single polynucleotide chain having all the required sequence for a functional complex with an effector protein (e.g., being bound by an effector protein, including in some embodiments, activating the effector protein, and hybridizing to a target nucleic acid, without the need for a second nucleic acid molecule). For example, an sgRNA can have two or more linked guide nucleic acid components (e.g., an intermediary RNA sequence, a repeat sequence, a spacer sequence and optionally a linker). In some embodiments, an sgRNA comprises a handle sequence, wherein the handle sequence comprises an intermediary sequence, a repeat sequence, and optionally a linker sequence.

[0087] The term, “single guide nucleic acid system,” as used herein, refers to a system that uses a guide nucleic acid complexed with one or more polypeptides described herein, wherein the complex is capable of interacting with a target nucleic acid in a sequence specific manner, and wherein the guide nucleic acid is capable of non-covalently interacting with the one or more polypeptides described herein, and wherein the guide nucleic acid is capable of hybridizing with a target sequence of the target nucleic acid. A single nucleic acid system lacks a duplex of a guide nucleic acid as hybridized to a second nucleic acid, wherein in such a duplex the second nucleic acid, and not the guide nucleic acid, is capable of interacting with the effector protein.

[0088] The term, “spacer sequence,” as used herein, refers to a nucleotide sequence in a guide nucleic acid that is capable of, at least partially, hybridizing to an equal length portion of a sequence (e.g., a target sequence) of a target nucleic acid. The term “spacer sequence” and “targeting sequence” are used interchangeably herein.

[0089] The term “subject,” as used herein, refers to a biological entity containing expressed genetic materials. The biological entity can be a plant, animal, or microorganism, including, for example, bacteria, viruses, fungi, and protozoa. The subject can be tissues, cells and their progeny of a biological entity obtained in vivo or cultured in vitro. The subject can be a mammal. The mammal can be a non-human primate. The mammal can be a cynomolgus monkey. The mammal can be a mouse, rat, or other rodent. The mammal can be a human. The subject may be diagnosed or suspected of being at high risk for a disease. In some embodiments, the subject is not necessarily diagnosed or suspected of being at high risk for the disease.

[0090] The term “target nucleic acid,” as used herein, refers to a nucleic acid that is selected as the nucleic acid for modification, binding, hybridization or any other activity of or interaction with a nucleic acid, protein, polypeptide, or peptide described herein. A target nucleic acid may comprise RNA, DNA, or a combination thereof. A target nucleic acid may be single-stranded (e.g., single-stranded RNA or single-stranded DNA) or double-stranded (e.g., double-stranded DNA).

[0091] The terms “target nucleic acid sequence” and “target sequence,” as used herein, when used in reference to a target nucleic acid, refers to a sequence of nucleotides found within a target nucleic acid. Such a sequence of nucleotides can, for example, hybridize to an equal length portion of a guide nucleic acid. Hybridization of the guide nucleic acid to the target sequence may bring an effector protein into contact with the target nucleic acid.

[0092] The term, “trans cleavage,” as used herein, in the context of cleavage (e.g., hydrolysis of a phosphodiester bond) of one or more target nucleic acids or non-target nucleic acids, or both, by an effector protein that is complexed with a guide nucleic acid and the target nucleic acid. Trans cleavage activity may be triggered by the hybridization of a guide nucleic acid to a target nucleic acid. The effector may cleave a target strand as well as non-target strand, wherein the target nucleic is a double stranded nucleic acid. Trans cleavage of the target nucleic acid may occur away from (e.g., not within or directly adjacent to) the portion of the target nucleic acid that is hybridized to the portion of the guide nucleic acid.

[0093] The terms, “trans-activating RNA,” “transactivating RNA,” and “tracrRNA,” refer to a transactivating or transactivated nucleic acid in a dual nucleic acid system that is capable of hybridizing, at least partially, to a crRNA to form a tracrRNA-crRNA duplex, and of interacting with an effector protein to form a complex (e.g., an RNP complex).

[0094] The terms, “transactivating,” “trans-activating,” “trans-activated,” “transactivated,” and grammatical equivalents thereof, as used herein, in the context of a dual nucleic acid system refers to an outcome of the system, wherein a polypeptide is enabled to have a binding and/or nuclease activity on a target nucleic acid, by a tracrRNA or a tracrRNA-crRNA duplex.

[0095] The term, “transcriptional activator,” as used herein, refers to a polypeptide or a fragment thereof that can activate or increase transcription of a target nucleic acid molecule.

[0096] The term “transcriptional repressor,” as used herein, refers to a polypeptide or a fragment thereof that is capable of arresting, preventing, or reducing transcription of a target nucleic acid.

[0097] The term, “transgene,” as used herein, refers to a nucleotide sequence that is inserted into a cell for expression of said nucleotide sequence in the cell. A transgene is meant to include (1) a nucleotide sequence that is not naturally found in the cell (e.g., a heterologous nucleotide sequence); (2) a nucleotide sequence that is a mutant form of a nucleotide sequence naturally found in the cell into which it has been introduced; (3) a nucleotide sequence that serves to add additional copies of the same (e.g., exogenous or homologous) or a similar nucleotide sequence naturally occurring in the cell into which it has been introduced; or (4) a silent naturally occurring or homologous nucleotide sequence whose expression is induced in the cell into which it has been introduced. A donor nucleic acid can comprise a transgene. The cell in which transgene expression occurs can be a target cell, such as a host cell.

[0098] The terms “treatment” and “treating,” as used herein, are used in reference to a pharmaceutical or other intervention regimen for obtaining beneficial or desired results in the recipient. Beneficial or desired results include but are not limited to a therapeutic benefit and/or a prophylactic benefit. A therapeutic benefit may refer to eradication or amelioration of symptoms or of an underlying disorder being treated. Also, a therapeutic benefit can be achieved with the eradication or amelioration of one or more of the physiological symptoms associated with the underlying disorder such that an improvement is observed in the subject, notwithstanding that the subject may still be afflicted with the underlying disorder. A prophylactic effect includes delaying, preventing, or eliminating the appearance of a disease or condition, delaying, or eliminating the onset of symptoms of a disease or condition, slowing, halting, or reversing the progression of a disease or condition, or any combination thereof. For prophylactic benefit, a subject at risk of developing a particular disease, or to a subject reporting one or more of the physiological symptoms of a disease may undergo treatment, even though a diagnosis of this disease may not have been made.

[0099] The term “viral vector,” as used herein, refers to a nucleic acid to be delivered into a host cell via a recombinantly produced virus or viral particle. The nucleic acid may be single-stranded or double stranded, linear or circular, segmented or non-segmented. The nucleic acid may comprise DNA, RNA, or a combination thereof. Non-limiting examples of viruses or viral particles that can deliver a viral vector include retroviruses (e.g., lentiviruses and γ-retroviruses), adenoviruses, arenaviruses, alphaviruses, adeno-associated viruses (AAVs), baculoviruses, vaccinia viruses, herpes simplex viruses and poxviruses. A viral vector delivered by such viruses or viral particles may be referred to by the type of virus to deliver the viral vector (e.g., an AAV viral vector is a viral vector that is to be delivered by an adeno-associated virus). A viral vector referred to by the type of virus to be delivered by the viral vector can contain viral elements (e.g., nucleotide sequences) necessary for packaging of the viral vector into the virus or viral particle, replicating the virus, or other desired viral activities. A virus containing a viral vector may be replication competent, replication deficient or replication defective.

### 2. Introduction

[0100] Disclosed herein are systems, compositions, and methods for the modification of the APOC3 gene. The APOC3 gene resides within the APOA5/APOA4/APOC3/APOA1 multigene cluster on the long arm of the human chromosome 11q23. It comprises 4 exons and 3 introns and encodes a 99 amino acid glycoprotein called apoC-III (or APOC3). This apolipoprotein is mostly expressed in hepatocytes and enterocytes, where it undergoes an intracellular cleavage, yielding the mature 79 amino acid protein. Furthermore, it undergoes a post-translational modification leading to the formation of three distinct isoforms containing zero (apoC-III0), one (apoC-III1) or two (apoC-III2) sialic acid residues, and importantly, all these isoforms exhibit the same plasma half-life and catabolic mechanisms, suggesting similar physiological implications.

[0101] At the transcriptional level, the APOC3 gene expression is tightly regulated by several proposed pathways. A series of in vivo and in vitro studies have demonstrated that its expression is downregulated by insulin, peroxisome proliferator-activated receptor α, Rev-erb, and farnesoid X receptor. Conversely, the positive responsiveness of the APOC3 promoter to glucose was reported. This factor stimulates the gene expression by the activation of the carbohydrate-responsive element binding protein, as well as the hepatocyte nuclear factor-4α. Hence, the opposite interplay between insulin and glucose on modulating APOC3 transcriptional activity may induce an enhanced apoC-III secretion under an insulin-resistant condition associated with hyperglycemia (as in type 2 diabetes). Also, the total apoC-III levels can be significantly modulated in hyperlipidemic individuals by the dietary intake of low saturated fat and high amounts of monosaturated and omega-3 polyunsaturated fatty acids. Dysregulated expression of APOC3 has been associated with dyslipidemia, hypertriglyceridemia, atherosclerosis, altered HDL functionality, and other cardiovascular disorders. Also, polymorphs of APOC3 (SstI, T-455C and C-482T) are known to associate with hypertriglyceridemia in mice, and the SstI and T-455C polymorphs significantly increased the susceptibility to CHD in humans.

[0102] Also disclosed herein are systems, compositions, and methods for the modification of the PCSK9 gene. PCSK9 is synthesized as a soluble zymogen that undergoes autocatalytic intramolecular processing in the endoplasmic reticulum. It is expressed mainly in liver, intestine, kidney, skin, and the central nervous system. After being processed in the ER, PCSK9 co-localizes with the protein sortilin on its way through the Golgi and trans-Golgi complex.

[0103] As a negative post-translational regulator of the low-density lipoprotein receptor (LDLR), PCSK9 plays a major role in cholesterol homeostasis. Upon binding of low-density lipoprotein (LDL) cholesterol to its receptor, the resulting LDLR-LDL complex is internalized. When exposed to the acidic environment within the resulting endosome LDLR adopts a hairpin conformation. This conformational change in turn induces the dissociation of the LDL-LDLR complex, allowing LDLR to be recycled back to the plasma membrane. Binding of PCSK9 binds to cell surface LDLR (through the LDLR EGF-A domain) also induces LDLR internalization. However, unlike LDL binding, PCSK9 prevents LDLR from undergoing a conformational change. This inhibition redirects LDLR to a lysosome where it is degraded. Thus, PCSK9 lowers cell surface expression of LDLR and thereby decreases metabolism of LDL-particles, which in turn may lead to hypercholesterolemia. PCSK9 also plays an important role in triglyceride-rich apoB lipoprotein production in small intestine and postprandial lipemia.

[0104] The PCSK9 gene resides on chromosome 1 at the band 1p32.3 and includes 15 exons. This gene produces two isoforms through alternative splicing. Variants of PCSK9 can reduce or increase circulating cholesterol. LDL-particles are removed from the blood when they bind to LDLR on the surface of cells, including liver cells, and are taken inside the cells. When PCSK9 binds to an LDLR, the receptor is destroyed along with the LDL particle. PCSK9 degrades LDLR by preventing the hairpin conformational change of LDLR. If PCSK9 does not bind, the receptor will return to the surface of the cell and can continue to remove LDL-particles from the bloodstream. Furthermore, PCSK9 directly promotes atherosclerosis by being involved in atherosclerotic inflammation and platelet activation.

[0105] Also disclosed herein are systems, compositions, and methods for the modification of the ANGPTL3 gene. The protein encoded by this gene is a member of the angiopoietin-like family of secreted factors. It is expressed predominantly in the liver, and has the characteristic structure of angiopoietins, consisting of a signal peptide, N-terminal coiled-coil domain, and the C-terminal fibrinogen (FBN)-like domain. The FBN-like domain in angiopoietin-like 3 protein was shown to bind alpha-5/beta-3 integrins, and this binding induced endothelial cell adhesion and migration.

[0106] In humans, ANGPTL3 is a determinant factor of HDL level and positively correlates with plasma HDL cholesterol. In genetic loss-of-function variants in only one copy of ANGPTL3, the serum LDL-C levels are reduced. In those with loss-of-function variants in both copies of ANGPTL3, low LDL-C, low HDL-C, and low triglycerides are seen (“familial combined hypolipidemia”).

[0107] In some embodiments, the present disclosure provides guide nucleic acids that are capable of binding to a target sequence in the APOC3, PCSK9, or ANGPTL genes. In some embodiments, the present disclosure provides guide nucleic acids that are capable of binding to a target sequence of the APOC3, PCSK9, or ANGPTL genes and an effector protein. In some embodiments, the effector protein is a CRISPR-associated (Cas) protein. In general, Cas proteins bind and/or modify nucleic acids in a sequence-specific manner. Cas proteins with guide nucleic acids may modify DNA at a precise target location in the genome of a wide variety of cells and organisms, allowing for precise and efficient editing of DNA sequences of interest (e.g., APOC3, PCSK9, or ANGPTL). In some embodiments, the present disclosure provides methods for treating a disease (e.g., coronary artery disease and other cardiovascular related disorders) by modifying one or more target genes (e.g., APOC3, PCSK9, or ANGPTL).

[0108] Compositions and systems disclosed herein are not naturally occurring. In general, guide nucleic acids disclosed herein are not found in nature. In some embodiments, systems and compositions herein comprise at least one non-naturally occurring component. For example, compositions and systems may comprise a guide nucleic acid, wherein the sequence of the guide nucleic acid is different or modified from that of a naturally-occurring guide nucleic acid. In some embodiments, compositions and systems comprise at least two components that do not naturally occur together. For example, compositions and systems may comprise a guide nucleic acid comprising a repeat sequence and a spacer sequence which do not naturally occur together. Also, by way of example, composition and systems may comprise a guide nucleic acid and an effector protein that do not naturally occur together. Conversely, and for clarity, an effector protein or guide nucleic acid that is “natural,” “naturally-occurring,” or “found in nature” includes effector proteins and guide nucleic acids from cells or organisms that have not been genetically modified by a human or machine.

### 3. Guide Nucleic Acids

[0109] The compositions, systems, and methods of the present disclosure may comprise a guide nucleic acid or a use thereof. Unless otherwise indicated, compositions, systems and methods comprising guide nucleic acids or uses thereof, as described herein and throughout, include DNA molecules, such as expression vectors, that encode a guide nucleic acid. Accordingly, compositions, systems, and methods of the present disclosure comprise a guide nucleic acid or a nucleotide sequence encoding the guide nucleic acid.

[0110] In general, guide nucleic acids comprise a nucleotide sequence. Such a nucleotide sequence may be described as a nucleotide sequence of either DNA or RNA, however, no matter the form the sequence is described, it is readily understood that such nucleotide sequences can be revised to be RNA or DNA, as needed, for describing a sequence within a guide nucleic acid itself or the sequence that encodes a guide nucleic acid. Similarly, disclosure of the nucleotide sequences described herein also discloses a complementary nucleotide sequence, a reverse nucleotide sequence, and the reverse complement nucleotide sequence, any one of which can be a nucleotide sequence for use in a guide nucleic acid. In some embodiments, a guide nucleic acid sequence(s) comprises one or more nucleotide alterations at one or more positions in any one of the sequences described herein. Alternative nucleotides can be any one or more of A, C, G, T or U, or a deletion, or an insertion.

[0111] A guide nucleic acid may comprise a non-naturally occurring sequence, wherein the sequence of the guide nucleic acid, or any portion thereof, may be different from the sequence of a naturally occurring guide nucleic acid. A guide nucleic acid of the present disclosure comprises one or more of the following: a) a single guide nucleic acid molecule; b) a DNA base; c) an RNA base; d) a modified base; e) a modified sugar; f) a modified backbone; and the like. Modifications are described herein and throughout the present disclosure A guide nucleic acid may be chemically synthesized or recombinantly produced by any suitable methods. Guide nucleic acids and portions thereof may be found in or identified from a CRISPR array present in the genome of a host organism or cell.

[0112] In some embodiments, the guide nucleic acid comprises a non-natural nucleobase sequence. In some embodiments, the non-natural sequence is a nucleobase sequence that is not found in nature. The non-natural sequence may comprise a portion of a naturally-occurring sequence, wherein the portion of the naturally-occurring sequence is not present in nature absent the remainder of the naturally-occurring sequence. In some embodiments, the nucleotide sequence of the guide nucleic acid is not found in nature. In some embodiments, the guide nucleic acid comprises two naturally-occurring sequences arranged in an order or proximity that is not observed in nature. In some embodiments, compositions and systems comprise a ribonucleotide complex comprising an effector protein and a guide nucleic acid that do not occur together in nature. Engineered guide nucleic acids may comprise a first sequence and a second sequence that do not occur naturally together. For example, a guide nucleic acid may comprise a sequence of a naturally-occurring repeat region and a spacer region that is complementary to a naturally-occurring eukaryotic sequence. The guide nucleic acid may comprise a sequence of a repeat region that occurs naturally in an organism and a spacer region that does not occur naturally in that organism. A guide nucleic acid may comprise a first sequence that occurs in a first organism and a second sequence that occurs in a second organism, wherein the first organism and the second organism are different. The guide nucleic acid may comprise a third sequence disposed at a 3′ or 5′ end of the guide nucleic acid, or between the first and second sequences of the guide nucleic acid. In some embodiments, a guide nucleic acid is a crRNA, wherein the crRNA comprises a repeat sequence and a spacer sequence that is complementary to a eukaryotic target sequence. In some embodiments, a guide nucleic acid may comprise a repeat sequence, an intermediary sequence, and a spacer sequence coupled by one or more linker sequences. In some embodiments, the guide nucleic acid comprises two heterologous sequences arranged in an order or proximity that is not observed in nature. Therefore, guide nucleic acid compositions described herein are not naturally occurring.

[0113] In general, a guide nucleic acid comprises a first nucleotide sequence that is capable of being non-covalently bound by an effector protein and a second nucleotide sequence that hybridizes to a target nucleic acid. In some embodiments, the first nucleotide sequence is located 5′ to second nucleotide sequence. In some embodiments, the second nucleotide sequence is located 5′ to first nucleotide sequence. In some embodiments, the first nucleotide sequence comprises a repeat sequence. In some embodiments, the first nucleotide sequence comprises an intermediary sequence. In some embodiments, an effector protein binds to at least a portion of the first nucleotide sequence. In some embodiments, the second nucleotide sequence comprises a spacer sequence, wherein the spacer sequence can interact in a sequence-specific manner with (e.g., has complementarity with, or can hybridize to a target sequence in) a target nucleic acid (e.g., the APOC3, PCSK9, or ANGPTL3 genes). Although the term may imply that a gRNA consists of RNA, in some embodiments, a gRNA may comprise one or more deoxyribonucleotides and/or a deoxyribonucleotide nucleobase (e.g., thymine). However, the majority of the nucleotides in a guide nucleic acid (at least 50%) are ribonucleotides.

[0114] Modifications can further include changing of nucleic acids described herein (e.g., engineered guide nucleic acids) to provide the nucleic acid with a new or enhanced feature, such as improved stability. Such modifications of a nucleic acid include a nucleobase base modification, a backbone modification, a sugar modification, or combinations thereof. In some embodiments, the modifications can be of one or more nucleotides, nucleosides, or nucleobases in a nucleic acid. In some embodiments, uridines can be exchanged for pseudouridines (e.g., 1N-Methyl-Pseudouridine). In some embodiments, all uridines can be exchanged for 1N-Methyl-Pseudouridine. In this application, U can represent uracil or 1N-Methyl-Pseudouridine.

[0115] The guide nucleic acid may also form complexes as described through herein. For example, a guide nucleic acid may hybridize to another nucleic acid, such as target nucleic acid, or a portion thereof. In another example, a guide nucleic acid may complex with an effector protein. In such embodiments, a guide nucleic acid-effector protein complex may be described herein as an RNP. In some embodiments, when in a complex, at least a portion of the complex may bind, recognize, and/or hybridize to a target nucleic acid (e.g., a target sequence in the APOC3, PCSK9, or ANGPTL3 genes). For example, when a guide nucleic acid and an effector protein are complexed to form an RNP, at least a portion of the guide nucleic acid hybridizes to a target sequence in a target nucleic acid (e.g., the APOC3, PCSK9, or ANGPTL3 genes). Those skilled in the art in reading the below specific examples of guide nucleic acids as used in RNPs described herein, will understand that in some embodiments, a RNP may hybridize to one or more target sequences in a target nucleic acid, thereby allowing the RNP to modify and/or recognize a target nucleic acid or sequence contained therein (e.g., PAM) or to modify and/or recognize non-target sequences depending on the guide nucleic acid, and in some embodiments, the effector protein, used.

[0116] In some embodiments, a guide nucleic acid may comprise or form intramolecular secondary structure (e.g., hairpins, stem-loops, etc.). In some embodiments, a guide nucleic acid comprises a stem-loop structure comprising a stem region and a loop region. In some embodiments, the stem region is 4 to 8 linked nucleotides in length. In some embodiments, the stem region is 5 to 6 linked nucleotides in length. In some embodiments, the stem region is 4 to 5 linked nucleotides in length. In some embodiments, the guide nucleic acid comprises a pseudoknot (e.g., a secondary structure comprising a stem, at least partially, hybridized to a second stem or half-stem secondary structure). An effector protein may recognize a guide nucleic acid comprising multiple stem regions. In some embodiments, the nucleotide sequences of the multiple stem regions are identical to one another. In some embodiments, the nucleotide sequences of at least one of the multiple stem regions is not identical to those of the others. In some embodiments, the guide nucleic acid comprises at least 2, at least 3, at least 4, or at least 5 stem regions.

[0117] In some embodiments, the compositions, systems, and methods of the present disclosure comprise two or more guide nucleic acids (e.g., 2, 3, 4, 5, 6, 7, 9, 10 or more guide nucleic acids), and/or uses thereof. Multiple guide nucleic acids may target an effector protein to different loci in the target nucleic acid by hybridizing to different target sequences. In some embodiments, a first guide nucleic acid may hybridize within a location of the target nucleic acid that is different from where a second guide nucleic acid may hybridize the target nucleic acid. In some embodiments, the first loci and the second loci of the target nucleic acid may be located at least 1, at least 10, at least 20, at least 30, at least 40, at least 50, at least 60, at least 70, at least 80, at least 90 or at least 100 nucleotides apart. In some embodiments, the first loci and the second loci of the target nucleic acid may be located between 100 and 200, 200 and 300, 300 and 400, 400 and 500, 500 and 600, 600 and 700, 700 and 800, 800 and 900 or 900 and 1000 nucleotides apart.

[0118] In some embodiments, the first loci and/or the second loci of the target nucleic acid are located in an intron of a gene (e.g., an intron of the APOC3, PCSK9, or ANGPTL3 genes). In some embodiments, the first loci and/or the second loci of the target nucleic acid are located in an exon of a gene (e.g., an exon of the APOC3, PCSK9, or ANGPTL3 genes). In some embodiments, the first portion and/or the second portion of the target nucleic acid are located on either side of an exon and cutting at both sites results in deletion of the exon. In some embodiments, composition, systems, and methods comprise a donor nucleic acid that may be inserted in replacement of a deleted or cleaved sequence of the target nucleic acid. In some embodiments, compositions, systems, and methods comprising multiple guide nucleic acids or uses thereof comprise multiple effector proteins, wherein the effector proteins may be identical, non-identical, or combinations thereof.

[0119] In some embodiments, the guide nucleic acid comprises about: 10, 11, 12, 13, 14, 15, 16, 17, 18, 19, 20, 21, 22, 23, 24, 25, 26, 27, 28, 29, 30, 31, 32, 33, 34, 35, 36, 37, 38, 39, 40, 41, 42, 43, 44, 45, 46, 47, 48, 49, 50, 51, 52, 53, 54, 55, 56, 57, 58, 59, or 60 linked nucleotides. In general, the guide nucleic acid comprises at least: 10, 15, 20, 25, 30, 35, 40, 45, 50, 55, 60 linked nucleotides. In some embodiments, the guide nucleic acid comprises about 10 to about 60, about 20 to about 50, or about 30 to about 40 linked nucleotides. In some embodiments, the guide nucleic acid comprises at least 25 linked nucleotides.

[0120] A guide nucleic acid may comprise 10 to 50 linked nucleotides. In some embodiments, the guide nucleic acid comprises or consists essentially of about 12 to about 80 linked nucleotides, about 12 to about 50, about 12 to about 45, about 12 to about 40, about 12 to about 35, about 12 to about 30, about 12 to about 25, from about 12 to about 20, about 12 to about 19, about 19 to about 20, about 19 to about 25, about 19 to about 30, about 19 to about 35, about 19 to about 40, about 19 to about 45, about 19 to about 50, about 19 to about 60, about 20 to about 25, about 20 to about 30, about 20 to about 35, about 20 to about 40, about 20 to about 45, about 20 to about 50, or about 20 to about 60 linked nucleotides. In some embodiments, the guide nucleic acid comprises about 10 to about 60, about 20 to about 50, or about 30 to about 40 linked nucleotides.

[0121] In some embodiments, a length of a guide nucleic acid is about 30 to about 120 linked nucleotides. In some embodiments, the length of a guide nucleic acid is about 40 to about 100, about 40 to about 90, about 40 to about 80, about 40 to about 70, about 40 to about 60, about 40 to about 50, about 50 to about 90, about 50 to about 80, about 50 to about 70, or about 50 to about 60 linked nucleotides. In some embodiments, the length of a guide nucleic acid is about 40, about 45, about 50, about 55, about 60, about 65, about 70 or about 75 linked nucleotides. In some embodiments, the length of a guide nucleic acid is greater than about 15, about 20, about 25, about 30, about 35, about 40, about 45, about 50, about 55, about 60, about 65, about 70 or about 75 linked nucleotides. In some embodiments, the length of a guide nucleic acid is not greater than about 40, about 45, about 50, about 55, about 60, about 65, about 70, about 75, about 80, about 85, about 90, about 95, about 100, about 105, about 110, about 115, about 120, or about 125 linked nucleotides.

[0122] In some embodiments, guide nucleic acids comprise elements that contribute functionality (e.g., stability, heat resistance, etc.) to the guide nucleic acid. Such elements may be one or more nucleotide alterations, nucleotide sequences, intermolecular secondary structures, or intramolecular secondary structures (e.g., one or more hair pin regions, one or more bulges, etc.).

[0123] In some embodiments, guide nucleic acids comprise one or more linkers connecting different nucleotide sequences as described herein. A linker may comprise 1, 2, 3, 4, 5, 6, 7, 8, 9, 10, or more nucleotides. A linker may be any suitable linker, examples of which are described herein.

[0124] Guide nucleic acids may comprise deoxyribonucleotides, ribonucleotides or a combination thereof. In some embodiments, a guide nucleic acid comprises a ribonucleotide with a thymine nucleobase. Guide nucleic acids may comprise a chemically modified nucleobase or phosphate backbone. Guide nucleic acids may be referred to herein as a guide RNA (gRNA). However, a guide RNA is not limited to ribonucleotides, but may comprise deoxyribonucleotides and other chemically modified nucleotides. A guide nucleic acid may comprise a non-naturally occurring guide nucleic acid, including a guide nucleic acid that is designed to contain a chemical or biochemical modification.

[0125] In some embodiments, effector proteins are targeted by a guide nucleic acid (e.g., a guide RNA) to a specific location in the target nucleic acid where they exert locus-specific nucleotide modification or gene regulation. Non-limiting examples of gene regulation include blocking RNA polymerase binding to a promoter (which selectively inhibits transcription activator function), and/or modifying local chromatin (e.g., modifying the target nucleic acid or modifying a protein associated with the target nucleic acid). The guide RNA may bind to a target nucleic acid (e.g., a single strand of a target nucleic acid) or a portion thereof, an amplicon thereof, or a portion thereof. By way of non-limiting example, a guide nucleic acid may bind to a portion of a gene associated with a genetic disorder, or an amplicon thereof, as described herein.

[0126] In some embodiments, the compositions, systems, and methods of the present disclosure may comprise an additional guide nucleic acid or a use thereof. An additional guide nucleic acid can target an effector protein to a different location in the target nucleic acid (e.g., APOC3, PCSK9, and ANGPTL3 genes) by binding to a different portion of the target nucleic acid from the first guide nucleic acid. A system in which two different guide nucleic acids are used to target two different locations in the target nucleic acid may be referred to as a dual guided system. In certain embodiments, upon removal of a sequence between two guide nucleic acids, the wild-type reading frame may be restored, e.g., by a polymerase, resulting in at least a partially functional protein.

### Single Guide Nucleic Acid Systems

[0127] In some embodiments, compositions, systems, and methods described herein comprise a single guide nucleic acid. In the single guide nucleic acid system, the effector protein is not transactivated by a guide nucleic acid. By way of non-limiting example, a single guide nucleic acid system does not require a tracrRNA. In other words, activity of the effector protein does not require binding to a second or intermediary guide nucleic acid molecule. Exemplary guide nucleic acids for a single guide nucleic acid system are crRNAs and sgRNAs.

crRNA

[0128] In some embodiments, the single guide nucleic acid comprises a crRNA. In general, a crRNA comprises a first region (FR) and a second region (SR), wherein the FR of the crRNA comprises a repeat sequence, and the SR of the crRNA comprises a spacer sequence. In some embodiments, the spacer sequence follows the repeat sequence in a 5′ to 3′ direction. In some embodiments, the spacer sequence precedes the repeat sequence in a 5′ to 3′ direction. In some embodiments, the repeat sequence and the spacer sequences are directly connected to each other (e.g., covalent bond (phosphodiester bond)). In some embodiments, the repeat sequence and the spacer sequence are connected by a linker.

[0129] In some embodiments, a crRNA is useful as a single guide nucleic acid system for compositions, methods, and systems described herein or as part of a single guide nucleic acid system for compositions, methods, and systems described herein. In such embodiments, a single guide nucleic acid system comprises a guide nucleic acid comprising a crRNA wherein, a repeat sequence of a crRNA is capable of causing a crRNA to interact with an effector protein. In some embodiments, a single guide nucleic acid system comprises a guide nucleic acid comprising a crRNA linked to another nucleotide sequence that is capable of being non-covalently bound by an effector protein. In some embodiments, a crRNA is sufficient to form complex with an effector protein (e.g., to form an RNP) through the repeat sequence and direct the effector protein to a target nucleic acid sequence through the spacer sequence.

[0130] In some embodiments, compositions and systems described herein comprise an effector protein or a nucleic acid encoding the effector protein, wherein the effector protein comprises an amino acid sequence that is at least 75%, at least 80%, at least 85%, at least 90%, at least 95%, at least 97%, at least 98%, at least 99% or 100% identical to any one of SEQ ID NOs: 32-33, 34-35, 45-46, 54-66, 203-204, 794, and 2090-2091; and a guide nucleic acid that consists essentially of a crRNA. In some embodiments, the crRNA comprises a sequence that is at least 70%, at least 75%, at least 80%, at least 85%, at least 90%, at least 95%, or 100% identical to a sequence selected from SEQ ID NOs: 1-31, 38-43, 67-202, 207-208, 491-493, 799-820, 830-999 and 1400-1569. In some embodiments, the crRNA consists of a sequence that is at least 70%, at least 75%, at least 80%, at least 85%, at least 90%, at least 95%, or 100% identical to a sequence selected from SEQ ID NOs: 1-31, 38-43, 67-202, 207-208, 491-493, 799-820, 830-999 and 1400-1569.

[0131] A crRNA may include deoxyribonucleosides, ribonucleosides, chemically modified nucleosides, or any combination thereof. In some embodiments, a crRNA comprises about: 10, 11, 12, 13, 14, 15, 16, 17, 18, 19, 20, 21, 22, 23, 24, 25, 26, 27, 28, 29, 30, 31, 32, 33, 34, 35, 36, 37, 38, 39, 40, 41, 42, 43, 44, 45, 46, 47, 48, 49, 50, 51, 52, 53, 54, 55, 56, 57, 58, 59, or 60 linked nucleotides. In some embodiments, a crRNA comprises at least: 10, 15, 20, 25, 30, 35, 40, 45, 50, 55, 60 linked nucleotides. In some embodiments, the length of the crRNA is about 20 to about 120 linked nucleotides. In some embodiments, the length of a crRNA is about 20 to about 100, about 30 to about 100, about 40 to about 100, about 40 to about 90, about 40 to about 80, about 40 to about 70, about 40 to about 60, about 40 to about 50, about 50 to about 90, about 50 to about 80, about 50 to about 70, or about 50 to about 60 linked nucleotides. In some embodiments, the length of a crRNA is about 20, about 25, about 30, about 35, about 40, about 45, about 50, about 55, about 60, about 65, about 70 or about 75 linked nucleotides.

sgRNA

[0132] In some embodiments, a guide nucleic acid comprises a single guide RNA (sgRNA). In some embodiments, an sgRNA can have two or more linked guide nucleic acid components (e.g., an intermediary RNA sequence, a repeat sequence, a spacer sequence, and optionally a linker). In some embodiments, an sgRNA comprises a handle sequence, wherein the handle sequence comprises an intermediary sequence, a repeat sequence, and optionally a linker sequence. In some embodiments, the guide nucleic acid is an sgRNA. The combination of a spacer sequence (e.g., a nucleotide sequence that hybridizes to a target sequence in a target nucleic acid) with a handle sequence may be referred to herein as a single guide RNA (sgRNA), wherein the spacer sequence and the handle sequence are covalently linked. In some embodiments, the spacer sequence and handle sequence are linked by a phosphodiester bond. In some embodiments, the spacer sequence and handle sequence are linked by one or more linked nucleotides. In some embodiments, a guide nucleic acid may comprise a spacer sequence, a repeat sequence, or handle sequence, or a combination thereof. In some embodiments, the handle sequence may comprise a portion of, or all of, a repeat sequence. In general, an sgRNA comprises a first region (FR) and a second region (SR), wherein the FR comprises a handle sequence and the SR comprises a spacer sequence.

[0133] In some embodiments, the compositions comprising a guide RNA and an effector protein without a tracrRNA (e.g., a single nucleic acid system), wherein the guide RNA is an sgRNA. An sgRNA may include deoxyribonucleosides, ribonucleosides, chemically modified nucleosides, or any combination thereof. An sgRNA may also include a nucleotide sequence that forms a secondary structure (e.g., one or more hairpin loops) that facilitates the binding of an effector protein to the sgRNA and/or modification activity of an effector protein on a target nucleic acid (e.g., a hairpin region). Such a sequence can be contained within a handle sequence as described herein.

[0134] In some embodiments, an sgRNA comprises one or more of one or more of a handle sequence, an intermediary sequence, a crRNA, a repeat sequence, a spacer sequence, a linker, or combinations thereof. For example, an sgRNA comprises a handle sequence and a spacer sequence; an intermediary sequence and a crRNA; an intermediary sequence, a repeat sequence, and a spacer sequence; and the like.

[0135] In some embodiments, sgRNA comprises an intermediary sequence and a crRNA. In some embodiments, an intermediary sequence is 5′ to a crRNA in an sgRNA. In some embodiments, an sgRNA comprises a linked intermediary sequence and crRNA. In some embodiments, an intermediary sequence and a crRNA are linked in an sgRNA directly (e.g., covalently linked intermediary sequence and crRNA. In some embodiments, an intermediary sequence and a crRNA are linked in an sgRNA directly (e.g., covalently linked, such as through a phosphodiester bond) In some embodiments, an intermediary sequence and a crRNA are linked in an sgRNA by any suitable linker, examples of which are provided herein.

[0136] In some embodiments, an sgRNA comprises a handle sequence and a spacer sequence. In some embodiments, a handle sequence is 5′ to a spacer sequence in an sgRNA. In some embodiments, an sgRNA comprises a linked handle sequence and spacer sequence. In some embodiments, a handle sequence and a spacer sequence are linked in an sgRNA directly (e.g., covalently linked, such as through a phosphodiester bond) In some embodiments, a handle sequence and a spacer sequence are linked in an sgRNA by any suitable linker, examples of which are provided herein.

[0137] In some embodiments, an sgRNA comprises an intermediary sequence, a repeat sequence, and a spacer sequence. In some embodiments, an intermediary sequence is 5′ to a repeat sequence in an sgRNA. In some embodiments, an sgRNA comprises a linked intermediary sequence and repeat sequence. In some embodiments, an intermediary sequence and a repeat sequence are linked in an sgRNA directly (e.g., covalently linked, such as through a phosphodiester bond) In some embodiments, an intermediary sequence and a repeat sequence are linked in an sgRNA by any suitable linker, examples of which are provided herein. In some embodiments, a repeat sequence is 5′ to a spacer sequence in an sgRNA. In some embodiments, an sgRNA comprises a linked repeat sequence and spacer sequence. In some embodiments, a repeat sequence and a spacer sequence are linked in an sgRNA directly (e.g., covalently linked, such as through a phosphodiester bond) In some embodiments, a repeat sequence and a spacer sequence are linked in an sgRNA by any suitable linker, examples of which are provided herein.

[0138] An exemplary handle sequence in an sgRNA may comprise, from 5′ to 3′, a 5′ region, a hairpin region, and a 3′ region. In some embodiments, the 5′ region may hybridize to the 3′ region. In some embodiments, the 5′ region does not hybridize to the 3′ region. In some embodiments, the 3′ region is covalently linked to a spacer sequence (e.g., through a phosphodiester bond). In some embodiments, the 5′ region is covalently linked to a spacer sequence (e.g., through a phosphodiester bond).

[0139] In some embodiments, compositions and systems described herein comprise an effector protein or a nucleic acid encoding the effector protein, wherein the effector protein comprises an amino acid sequence that is at least 75%, at least 80%, at least 85%, at least 90%, at least 95%, at least 97%, at least 98%, at least 99% or 100% identical to any one of SEQ ID NOs: 773-776 and 778-793; and a guide nucleic acid that comprises an sgRNA. In some embodiments, the sgRNA comprises a sequence that is at least 70%, at least 75%, at least 80%, at least 85%, at least 90%, at least 95%, or 100% identical to a sequence selected from SEQ ID NOs: 44, 209-490, 494-772, 822-829, 1000-1399, and 1570-2086. In some embodiments, the sgRNA consists of a sequence that is at least 70%, at least 75%, at least 80%, at least 85%, at least 90%, at least 95%, or 100% identical to a sequence selected from SEQ ID NOs: 44, 209-490, 494-772, 822-829, 1000-1399, and 1570-2086.

### Dual Nucleic Acid Systems

[0140] In some embodiments, compositions, systems and methods described herein comprise a dual nucleic acid system comprising a crRNA or a nucleotide sequence encoding the crRNA, a tracrRNA, or a nucleotide sequence encoding the tracrRNA, and one or more effector protein or a nucleotide sequence encoding the one or more effector protein, wherein the crRNA and the tracrRNA are separate, unlinked molecules, wherein a repeat hybridization region of the tracrRNA is capable of hybridizing with an equal length portion of the crRNA to form a tracrRNA-crRNA duplex, wherein the equal length portion of the crRNA does not include a spacer sequence of the crRNA, and wherein the spacer sequence is capable of hybridizing to a target sequence of the target nucleic acid. In the dual nucleic acid system having a complex of the guide nucleic acid, tracrRNA, and the effector protein, the effector protein is transactivated by the tracrRNA. In other words, in a dual nucleic acid system, activity of the effector protein requires binding to a tracrRNA molecule.

[0141] In some embodiments, a repeat hybridization sequence is at the 3′ end of a tracrRNA sequence. In some embodiments, a repeat hybridization sequence may have a length of about 1, about 2, about 3, about 4, about 5, about 6, about 7, about 8, about 9, about 10, about 12, about 14, about 16, about 18, or about 20 linked nucleotides. In some embodiments, the length of the repeat hybridization sequence is 1 to 20 linked nucleotides.

[0142] A tracrRNA and/or tracrRNA-crRNA duplex may form a secondary structure that facilitates the binding of an effector protein to a tracrRNA or a tracrRNA-crRNA. In some embodiments, the secondary structure modifies activity of the effector protein on a target nucleic acid. In some embodiments, the secondary structure comprises a stem-loop structure comprising a stem region and a loop region. In some embodiments, the stem region is 4 to 8 linked nucleotides in length. In some embodiments, the stem region is 5 to 6 linked nucleotides in length. In some embodiments, the stem region is 4 to 5 linked nucleotides in length. In some embodiments, the secondary structure comprises a pseudoknot (e.g., a secondary structure comprising a stem at least partially hybridized to a second stem or half-stem secondary structure). An effector protein may recognize a secondary structure comprising multiple stem regions. In some embodiments, nucleotide sequences of the multiple stem regions are identical to one another. In some embodiments, the nucleotide sequences of at least one of the multiple stem regions is not identical to those of the others. In some embodiments, the secondary structure comprises at least two, at least three, at least four, or at least five stem regions. In some embodiments, the secondary structure comprises one or more loops. In some embodiments, the secondary structure comprises at least one, at least two, at least three, at least four, or at least five loops.

### Spacer Sequences

[0143] Guide nucleic acids described herein may comprise one or more spacer sequences (spacer sequences are also referred to throughout this specification as “targeting sequences” and the two terms are interchangeable). In some embodiments, a spacer sequence is capable of hybridizing to a target sequence of a target nucleic acid. In some embodiments, a spacer sequence comprises a nucleotide sequence that is, at least partially, hybridizable to an equal length of a sequence (e.g., a target sequence) of a target nucleic acid. Exemplary hybridization conditions are described herein. In some embodiments, the spacer sequence may function to direct an RNP complex comprising the guide nucleic acid to the target nucleic acid for detection and/or modification. The spacer sequence may function to direct a RNP to the target nucleic acid for detection and/or modification. A spacer sequence may be complementary to a target sequence that is adjacent to a PAM that is recognizable by an effector protein described herein.

[0144] The spacer sequence of a guide nucleic acid is complementary to a target sequence of a target nucleic acid. The spacer sequence of a guide nucleic acid may be at least 70%, at least 75%, at least 80%, at least 85%, at least 90%, at least 95%, or 100% complementary to a target sequence of a target nucleic acid. In general, the spacer sequence is capable of hybridizing to a target sequence of a target nucleic acid. It is understood that the spacer sequence need not be 100% complementary to that of a target sequence of a target nucleic acid to hybridize or hybridize specifically to the target sequence.

[0145] In some embodiments, the spacer region is 5-50 linked nucleotides in length. In some embodiments, the spacer region is 15-28 linked nucleotides in length. In some embodiments, the spacer region is 15-26, 15-24, 15-22, 15-20, 15-18, 16-28, 16-26, 16-24, 16-22, 16-20, 16-18, 17-26, 17-24, 17-22, 17-20, 17-18, 18-26, 18-24, or 18-22 linked nucleotides in length. In some embodiments, the spacer region is 18-24 linked nucleotides in length. In some embodiments, the spacer region is at least 15 linked nucleotides in length. In some embodiments, the spacer region is at least 16, 18, 20, or 22 linked nucleotides in length. In some embodiments, the spacer region comprises at least 10, 11, 12, 13, 14, 15, 16, 17, 18, 19, 20, 21, 22, 23, 24, 25, 26, 27, 28, 29, or 30 nucleotides. In some embodiments, the spacer region is at least 17 linked nucleotides in length. In some embodiments, the spacer region is at least 18 linked nucleotides in length. In some embodiments, the spacer region is at least 20 linked nucleotides in length. In some embodiments, the spacer region is at least 80%, at least 85%, at least 90%, at least 95% or 100% complementary to a target sequence of the target nucleic acid. In some embodiments, the spacer region is 100% complementary to the target sequence of the target nucleic acid. In some embodiments, the spacer region comprises at least 15 contiguous nucleobases that are complementary to the target nucleic acid.

[0146] In some embodiments, a spacer sequence is adjacent to a repeat sequence. In some embodiments, a spacer sequence follows a repeat sequence in a 5′ to 3′ direction. In some embodiments, a spacer sequence precedes a repeat sequence in a 5′ to 3′ direction. In some embodiments, the spacer sequence(s) and the repeat sequence(s) of the guide nucleic acid are present within the same molecule. In some embodiments, the spacer(s) and repeat sequence(s) are linked directly to one another. In some embodiments, a linker is present between the spacer(s) and repeat sequences. Linkers may be any suitable linker. In some embodiments, the spacer sequence(s) and the repeat sequence(s) of the guide nucleic acid are present in separate molecules, which are joined to one another by base pairing interactions.

[0147] In some embodiments, a spacer sequence comprises a nucleotide sequence that is at least 65%, at least 70%, at least 75%, at least 80%, at least 85%, at least 90%, at least 95% or 100% complementary to a target sequence of a target nucleic acid (e.g., the APOC3, PCSK9, or ANGPTL3 genes). A spacer sequence is capable of hybridizing to an equal length portion of a target nucleic acid (e.g., a target sequence). In some embodiments, a spacer sequence comprises a sequence that is at least 65%, at least 70%, at least 75%, at least 80%, at least 85%, at least 90%, at least 95% or 100% complementary to a target sequence of an APOC3 target nucleic acid. In some embodiments, a spacer sequence comprises a sequence that is at least 65%, at least 70%, at least 75%, at least 80%, at least 85%, at least 90%, at least 95% or 100% complementary to a target sequence of a PCKS9 target nucleic acid. In some embodiments, a spacer sequence comprises a sequence that is at least 65%, at least 70%, at least 75%, at least 80%, at least 85%, at least 90%, at least 95% or 100% complementary to a target sequence of a ANGPTL3 target nucleic acid. In some embodiments, the spacer sequence comprises at least 10, at least 11, at least 12, at least 13, at least 14, at least 15, at least 16, at least 17, at least 18, at least 19, or at least 20 contiguous nucleotides that are capable of hybridizing to the target sequence. In some embodiments, the spacer sequence comprises at least 10, at least 11, at least 12, at least 13, at least 14, at least 15, at least 16, at least 17, at least 18, at least 19, or at least 20 contiguous nucleotides that are complementary to the target sequence.

### APOC3 Spacer Sequences

[0148] TABLE 1 and TABLE 2 provides illustrative spacer sequences targeting the APOC3 gene for use with the compositions, systems, and methods of the disclosure. In particular, TABLE 1 provides spacer sequences suitable for use in combination with an effector protein of SEQ ID NO: 32 or variants thereof (e.g., variants provided in TABLES 18 and 19). In particular, TABLE 2 provides spacer sequences suitable for use in combination with an effector protein of SEQ ID NO: 773 or variants thereof (e.g., variants provided in TABLES 16 and 17). In some embodiments, the spacer sequence comprises at least 70%, at least 80%, at least 90%, at least 91%, at least 92%, at least 93%, at least 94%, at least 95%, at least 96%, at least 97%, or at least 99%, or 100% sequence identity to a sequence as set forth in TABLE 1 or TABLE 2. In some embodiments, spacer sequences comprise at least 10, at least 11, at least 12, at least 13, at least 14, at least 15, at least 16, at least 17, at least 18, at least 19, or at least 20 contiguous nucleotides of a sequence selected from any one of SEQ ID NOs: 1-15, 67-72, 207, 209-299, 804-805, 823-825, 830-1399, 2018-2026, and 2084-2086.

[0149] Guide nucleic acids disclosed herein may target various regions of the APOC3 gene. In some embodiments, spacer sequences are complementary to a target sequence in exon 1 of APOC3. In some embodiments, spacer sequences hybridize to a target sequence in exon 1 of APOC3. By way of non-limiting example, spacer sequences that are complementary to exon 1 of APOC3 include SEQ ID NOs: 209-211. In some embodiments, spacer sequences are complementary to a target sequence in exon 2 of APOC3. In some embodiments, spacer sequences hybridize to a target sequence in exon 2 of APOC3. By way of non-limiting example, spacer sequences that are complementary to exon 2 of APOC3 includes SEQ ID NO: 212. In some embodiments, spacer sequences are complementary to a target sequence in exon 3 of APOC3. In some embodiments, spacer sequences hybridize to a target sequence in exon 3 of APOC3. By way of non-limiting example, spacer sequences that are complementary to exon 3 of APOC3 include SEQ ID NOs: 213-217. In some embodiments, spacer sequences are complementary to a target sequence in exon 4 of APOC3. In some embodiments, spacer sequences hybridize to a target sequence in exon 4 of APOC3. By way of non-limiting example, spacer sequences that are complementary to exon 4 of APOC3 include SEQ ID NOs: 1-15 and 218-269. In some embodiments, spacer sequences are complementary to a splice donor site of exon 1 of APOC3. In some embodiments, spacer sequences hybridize to a splice donor site of exon 1 of APOC3. By way of non-limiting example, spacer sequences that are complementary to a splice donor site of exon 1 of APOC3 include SEQ ID NO: 67, 68, and 270-280. In some embodiments, spacer sequences are complementary to a splice donor site of exon 2 of APOC3. In some embodiments, spacer sequences hybridize to a splice donor site of exon 2 of APOC3. By way of non-limiting example, spacer sequences that are complementary to a splice donor site of exon 2 of APOC3 include SEQ ID NOs: 69, 207, and 296. In some embodiments, spacer sequences are complementary to a splice donor site of exon 3 of APOC3. In some embodiments, spacer sequences hybridize to a splice donor site of exon 3 of APOC3. By way of non-limiting example, spacer sequences that are complementary to a splice donor site of exon 3 of APOC3 include SEQ ID NO: 70, 71, and 281-295. In some embodiments, spacer sequences are complementary to a splice donor site of exon 4 of APOC3. In some embodiments, spacer sequences hybridize to a splice donor site of exon 4 of APOC3. By way of non-limiting example, spacer sequences that are complementary to a splice donor site of exon 4 of APOC3 include SEQ ID NOs: 72 and 297.

TABLE 1
Exemplary Spacer Sequences Targeting APOC3 for
CasPhi.12 Effector Proteins

| | Spacer sequence | SEQ |
|---|---|---|
| Spacer ID | (5′ to 3′), shown as RNA | ID NO: |
| 114178 | UCCUUAACGGUGCUCCA | 1 |
| 114179 | ACGGUGCUCCAGUAGUC | 2 |
| n/a | AAGCAACCUACAGGGGC | 3 |
| n/a | UCCAGCUUUAUUGGGAG | 4 |
| n/a | GGGUAUUGAGGUCUCAG | 5 |
| n/a | AGCAACCUACAGGGGCA | 6 |
| 114188 | AGGGAACUGAAGCCAUC | 7 |
| n/a | UAAGCAACCUACAGGGG | 8 |
| n/a | UUGTCCAGCUUUAUUGG | 9 |
| 114193 | CAGGGAACUGAAGCCAU | 10 |
| 114195 | CCUGAAAGACUACUGGA | 11 |
| n/a | AAAGGGACAGUAUUCUC | 12 |
| n/a | CUUAAAAGGGACAGUAU | 13 |
| 114201 | AGUUCCCUGAAAGACUA | 14 |
| n/a | AUCCCUAGAGGCAGCUG | 15 |
| 114212 | CCCUCCCCAGAGGGCAU | 67 |
| 114230 | CCCCUCCCCAGAGGGCA | 68 |
| 114260 | CUUGCAGGAACAGAGGC | 69 |
| 127527 | CCUCAGGAGCUUCAGAG | 70 |
| 127528 | CUCAGGAGCUUCAGAGG | 71 |
| 127529 | UCAUGCCCUGCUCUGUU | 72 |
| n/a | GUGGGACUGGGCUGGGG | 207 |
| PL34716 | CUUGCAGGAACAGAGGUGCC | 804 |
| PL34717 | CCUCAGGAGCUUCAGAGGCC | 805 |
| 132842 | CCCAACUCUCCCGCCCG | 830 |
| 132843 | AGGCUUAGGGCUGGAGG | 831 |
| 132844 | CCCUCUCACCAGCCUCU | 832 |
| 132845 | AGGGCUUGGGGCUGGUG | 833 |
| 132846 | CUCCAAACACCCCCCAG | 834 |
| 132847 | GGGCUGGAGGAAGCCUU | 835 |
| 132848 | CCAACUCUCCCGCCCGC | 836 |
| 132849 | GCUGGACUGGACGGAGA | 837 |
| 132850 | UCUGCUCCAUCCCACCC | 838 |
| 132851 | CCCAGCGCCCUGGGUCC | 839 |
| 132852 | UGUGCCUUUACUCCAAA | 840 |
| 132853 | CUGCAUCUGGACACCCU | 841 |
| 132854 | CUAGAGCUAAGGAAGCC | 842 |
| 132855 | GCCCAGCGCCCUGGGUC | 843 |
| 132856 | CAGUGUGAAAGGCUGAG | 844 |
| 132857 | UUCAGGCUUAGGGCUGG | 845 |
| 132858 | GGGCCUCGAUCCCUCGC | 846 |
| 132859 | ACUCCAAACACCCCCCA | 847 |
| 132860 | AGUCUGGUGGGUUUUCU | 848 |
| 132861 | CCCAAAGCUACACAGGG | 849 |
| 132862 | UGCUCCAUCCCACCCAC | 850 |
| 132863 | AUGUUCAGUCUGGUGGG | 851 |
| 132864 | CUGCUCCAUCCCACCCA | 852 |
| 132865 | AUCCCUAGAGGCAGCUG | 853 |
| 132866 | GACAGCCCAGUCCUACC | 854 |
| 132867 | GGGCUGGUGGAGGGAGG | 855 |
| 132868 | CUGAGCUCAUCUGGGCU | 856 |
| 132869 | GGCCUCGAUCCCUCGCC | 857 |
| 132870 | UCAAGUCUGAAGAAGCC | 858 |
| 132871 | CCCCUCUCACCAGCCUC | 859 |
| 132872 | UUCUCAAGUCUGAAGAA | 860 |
| 132873 | CCCCCUCAUUCUUCAGG | 861 |
| 132874 | GGCUGGGGGGUGUUUGG | 862 |
| 132875 | GGAAAUCCCUAGGAGAC | 863 |
| 132876 | AGAACAAGUGGGUGGCU | 864 |
| 132877 | UAUCAUCUCCAGGGCAG | 865 |
| 132878 | CAGGCCCCUCCCUCCAC | 866 |
| 132879 | CCUGGAGCAGCUGCCUC | 867 |
| 132880 | AGGUUAUGAUGAGGGGU | 868 |
| 132881 | CUGGCUGGGCUGGGCAG | 869 |
| 132882 | CUAGCUGACUGGCUCCC | 870 |
| 132883 | UUCAGACUUGAGAACAA | 871 |
| 132884 | GAGUAAAGGCACAGAAG | 872 |
| 132885 | GGCAAGUGACACCCCUC | 873 |
| 132886 | UGAUGAGGGGUGGGGGG | 874 |
| 132887 | UGGCCCUCUCCAGGCCU | 875 |
| 132888 | UUCAGGUUAUGAUGAGG | 876 |
| 132889 | UAUAUCAUCUCCAGGGC | 877 |
| 132890 | CCCUCCCCAGAGGGCAU | 878 |
| 132891 | CCCCUCUUCAUCCUCCU | 879 |
| 132892 | UCCAGGCUUGCUGGCUG | 880 |
| 132893 | CACACUGGAAUUUCAGG | 881 |
| 132894 | CCUGUCUGGGGUAGGAC | 882 |
| 132895 | GCUCUAGCAAGUGCUUC | 883 |
| 132896 | CUGGCCCUCUCCAGGCC | 884 |
| 132897 | AGACUUGAGAACAAGUG | 885 |
| 132898 | GGAGUAAAGGCACAGAA | 886 |
| 132899 | CCCCUCCCCAGAGGGCA | 887 |
| 132900 | GAGCCACUUCCAGCCCC | 888 |
| 132901 | CUUCCUAGCUGACUGGC | 889 |
| 132902 | CUCCAGCCCUAAGCCUG | 890 |
| 132903 | UGACCUGUUUUAUAUCA | 891 |
| 132904 | CAGCCCCACCCCCUGUG | 892 |
| 132905 | AGGCCCCUCCCUCCACC | 893 |
| 132906 | CUUAGCUCUAGCAAGUG | 894 |
| 132907 | GGGCAAGUGACACCCCU | 895 |
| 132908 | CCCUGUCUGGGGUAGGA | 896 |
| 132909 | GGUGAUUUCUGGCCCUC | 897 |
| 132910 | GGGUGAUUUCUGGCCCU | 898 |
| 132911 | ACACUGGAAUUUCAGGC | 899 |
| 132912 | GACAUAGGCCAGGGGCC | 900 |
| 132913 | AUAUCAUCUCCAGGGCA | 901 |
| 132914 | AUCCUCCUCCCCUCCUC | 902 |
| 143961 | UCCCACUGAUAUUAGAU | 903 |
| 143962 | UGGCCCAUAGCCUCCCU | 904 |
| 143963 | CAGGCAGCUCUGCCACU | 905 |
| 143964 | CAGUAGAAUGGAAUGGG | 906 |
| 143965 | UAUUGGCUCCAGGAUGG | 907 |
| 143966 | CUUCCUCUCCUCCCCAG | 908 |
| 143967 | CAGUCCUGGGUAGGCAU | 909 |
| 143968 | CCUGGAGUAGCUAGCUG | 910 |
| 143969 | CCCAGCUUCUAGCCCCC | 911 |
| 143970 | UCCCUCCAGCUCUUUGU | 912 |
| 143971 | CCUUCCUUCCUCUCCUC | 913 |
| 143972 | CUCGCUAGGACUCAGUU | 914 |
| 143973 | AGAAAUCCCUCUGAGAU | 915 |
| 143974 | GUUUCUUCCCUUCCUUC | 916 |
| 143975 | UUCAGUCCUGGGUAGGC | 917 |
| 143976 | CCCAUGCUUUUCACGGC | 918 |
| 143977 | UUCCCUUCCUUCCUCUC | 919 |
| 143978 | CAUGCCCCCACACUGAC | 920 |
| 143979 | CUUUUCCUCGCUAGGAC | 921 |
| 143980 | CCUCGCUAGGACUCAGU | 922 |
| 143981 | UAUAUUGGCUCCAGGAU | 923 |
| 143982 | GCUCCAGGAUGGGACAG | 924 |
| 143983 | CACGGCCACCUCCGCCA | 925 |
| 143984 | UAGCCCCCCCCACACCA | 926 |
| 143985 | UUUCAGUCCUGGGUAGG | 927 |
| 143986 | GGCCCAUAGCCUCCCUU | 928 |
| 143987 | CUUCCCUUCCUUCCUCU | 929 |
| 143988 | GACCUCAGGCCUGCUUU | 930 |
| 143989 | CCCCAGCUUCUAGCCCC | 931 |
| 143990 | UUUCUUCCCUUCCUUCC | 932 |
| 143991 | UAGGGAUAAAACUGAGC | 933 |
| 143992 | AUAUUGGCUCCAGGAUG | 934 |
| 143993 | ACGGCCACCUCCGCCAC | 935 |
| 143994 | ACAGCCUAGAGCCAGUG | 936 |
| 143995 | ACAGAAGCCACCUGAAA | 937 |
| 143996 | UCAGUCCUGGGUAGGCA | 938 |
| 143997 | UCACGGCCACCUCCGCC | 939 |
| 143998 | UCCUCGCUAGGACUCAG | 940 |
| 143999 | CUCCCACUGAUAUUAGA | 94 |
| 144000 | UUUUCCUCGCUAGGACU | 942 |
| 144001 | UGUGGGCUAGAUGGCUG | 943 |
| 144002 | GCCCAUAGCCUCCCUUU | 944 |
| 144003 | UAAUAGCUCAGAGCAAG | 945 |
| 144004 | AGUCCUGGGUAGGCAUG | 946 |
| 144005 | CAGCCUAGAGCCAGUGA | 947 |
| 144006 | CUCUCCUCCCCAGGGGC | 948 |
| 144007 | GAUAGAGAACUACAGUA | 949 |
| 144008 | GUGGCGGAGGUGGCCGU | 950 |
| 144009 | GGUCAUGCUGUCCCUUG | 951 |
| 144010 | GGUUCCUGGUGUGGGGG | 952 |
| 144011 | UCAGCAUAUUAGAGUAG | 953 |
| 144012 | UAUCCCUAGAAGCAGCU | 954 |
| 144013 | UCUAUCUAAUAUCAGUG | 955 |
| 144014 | CUAUACUCCACCUUCCA | 956 |
| 144015 | CCCAUUCCAUUCUACUG | 957 |
| 144016 | CUCCGUUGCUCCACAGU | 958 |
| 144017 | UCCCCUGUCUUUUCCUG | 959 |
| 144018 | AUCCCUAGAAGCAGCUA | 960 |
| 144019 | CACCCCACUUGGGGGGC | 961 |
| 144020 | UUUCUCAGCAUAUUAGA | 962 |
| 144021 | CAGGUGGCUUCUGUGAA | 963 |
| 144022 | CCCAGCUCACUGGGCCU | 964 |
| 144023 | CUCAGCAUAUUAGAGUA | 965 |
| 144024 | CAUUCUACUGGAAGGCU | 966 |
| 144025 | UCCUGUCUCACCGACCU | 967 |
| 144026 | GUAUCCAUGCCUACCCA | 968 |
| 144027 | AGGUGGCUUCUGUGAAG | 969 |
| 144028 | GGAUCACAGGUGGAGGU | 970 |
| 144029 | UUUAGCUUGCUCUGAGC | 971 |
| 144030 | GAAGCCUUUGGUAUCCA | 972 |
| 144031 | CUGUCUCACCGACCUCA | 973 |
| 144032 | UGUGAAGGAGCCUGUCA | 974 |
| 144033 | ACUCUGCCCCCUCCCAC | 975 |
| 144034 | UCUCACUAAUCCCUGCC | 976 |
| 144035 | UACUGGAAGGCUUUCAG | 977 |
| 144036 | UAUACUCCACCUUCCAC | 978 |
| 144037 | GCCCAGCUCACUGGGCC | 979 |
| 144038 | CUCUGAGCUAUUAGAAG | 980 |
| 144039 | GGGGGCUGGGUCUACUG | 981 |
| 144040 | GGAUUCAUGACCCAGGA | 982 |
| 144041 | CCUGCUCAGUUUUAUCC | 983 |
| 144042 | CUCAACUCCUCUGGCAG | 984 |
| 144043 | CUGCCUCAGGCUCUGGU | 985 |
| 144044 | UGUGCCCGCUGUCCCAU | 986 |
| 144045 | UCCUUCUCUCACUAAUC | 987 |
| 144046 | GCUUGCUCUGAGCUAUU | 988 |
| 144047 | UCAACUCCUCUGGCAGA | 989 |
| 144048 | CCUGUCUCACCGACCUC | 990 |
| 144049 | CUCCACAGUGGCACCAC | 991 |
| 144050 | UCCCUAGAAGCAGCUAG | 992 |
| 144051 | GGACUCAUGGUCUCCAC | 993 |
| 144052 | AGCUUGCUCUGAGCUAU | 994 |
| 144053 | GGUAUCCAUGCCUACCC | 995 |
| 144054 | CUGGUGUGGGGGGGGCU | 996 |
| 144055 | CACUGGGUAGUGGCAGA | 997 |
| 144056 | UGCAGAGUAUUUCUAUA | 998 |
| 144057 | GAGUAGAUGUCCCGUUC | 999 |

TABLE 2
Exemplary Spacer Sequences Targeting APOC3 for
CasM.265466 Effector Proteins

| | Spacer sequence (5′ to 3′), | SEQ |
|---|---|---|
| Spacer ID | shown as RNA | ID NO: |
| 127937 | CCUAGAGGCAGCUGCUCCAG | 209 |
| 127938 | CAUCCCUAGAGGCAGCUGCU | 210 |
| 127939 | AUCCCUAGAGGCAGCUGCUC | 211 |
| 125647 | GGUUGCUUAAAAGGGACAGU | 212 |
| 125662 | AGCAACCUACAGGGGCAGCC | 213 |
| 125674 | CAGCCCCGGGUACUCCUUGU | 214 |
| 127961 | CCAGGUGGCCCAGCAGGCCA | 215 |
| 127965 | CAGGAGUCCCAGGUGGCCCA | 216 |
| 127970 | AGUGCAUCCUUGGCGGUCUU | 217 |
| 125678 | CUGGGCCACCUGGGACUCCU | 218 |
| 125679 | CAUCCUUGGCGGUCUUGGUG | 219 |
| 125682 | GGUGACCGAUGGCUUCAGUU | 220 |
| 125683 | CCCCUGUAGGUUGCUUAAAA | 221 |
| 125687 | GAGCACCGUUAAGGACAAGU | 222 |
| 125688 | GCUUCAGUUCCCUGAAAGAC | 223 |
| 125694 | AGACCUCAAUACCCCAAGUC | 224 |
| 125696 | CUUAAAAGGGACAGUAUUCU | 225 |
| 125697 | AAGCUGGACAAGAAGCUGCU | 226 |
| 125699 | CCUGAGACCUCAAUACCCCA | 227 |
| 125704 | ACCGAUGGCUUCAGUUCCCU | 228 |
| 125709 | AAAGGGACAGUAUUCUCAGU | 229 |
| 125710 | AAGCCAUCGGUCACCCAGCC | 230 |
| 125714 | UCCCUUUUAAGCAACCUACA | 231 |
| 125715 | UCCUUAACGGUGCUCCAGUA | 232 |
| 125716 | AGAAUACUGUCCCUUUUAAG | 233 |
| 125718 | CCUGGAGGGGGGCCAGGCAU | 234 |
| 125722 | ACGGUGCUCCAGUAGUCUUU | 235 |
| 125723 | GCAGCUUCUUGUCCAGCUUU | 236 |
| 125724 | GUCUUUCAGGGAACUGAAGC | 237 |
| 125727 | GGGUAUUGAGGUCUCAGGCA | 238 |
| 125729 | CUCCAGUAGUCUUUCAGGGA | 239 |
| 125734 | GACUUGGGGUAUUGAGGUCU | 240 |
| 125738 | CUGUCCCUUUUAAGCAACCU | 241 |
| 127996 | CCCUGAAAGACUACUGGAGC | 242 |
| 128004 | UAGGUUGCUUAAAAGGGACA | 243 |
| 128006 | CCUGAAAGACUACUGGAGCA | 244 |
| 128011 | CUGGAGCACCGUUAAGGACA | 245 |
| 128016 | AAAGACUACUGGAGCACCGU | 246 |
| 128021 | GCUUAAAAGGGACAGUAUUC | 247 |
| 128025 | AGUUCCCUGAAAGACUACUG | 248 |
| 128032 | CAGUUCCCUGAAAGACUACU | 249 |
| 128035 | AAUACCCCAAGUCCACCUGC | 250 |
| 128036 | AUGCCUGGCCCCCCUCCAGG | 251 |
| 128041 | CAGGGCUGCCCCUGUAGGUU | 252 |
| 128042 | AAAAGGGACAGUAUUCUCAG | 253 |
| 128047 | CCAAUAAAGCUGGACAAGAA | 254 |
| 128076 | AGGGAACUGAAGCCAUCGGU | 255 |
| 128080 | UUAAGCAACCUACAGGGGCA | 256 |
| 128081 | CUUGUCCAGCUUUAUUGGGA | 257 |
| 128085 | CCUUUUAAGCAACCUACAGG | 258 |
| 128100 | UUUCAGGGAACUGAAGCCAU | 259 |
| 128109 | CUUAACGGUGCUCCAGUAGU | 260 |
| 128110 | CAGUAGUCUUUCAGGGAACU | 261 |
| 128111 | UCAGGGAACUGAAGCCAUCG | 262 |
| 128112 | AACGGUGCUCCAGUAGUCUU | 263 |
| 128113 | UAAGCAACCUACAGGGGCAG | 264 |
| 128115 | UUGUCCAGCUUUAUUGGGAG | 265 |
| 128116 | GGGGUAUUGAGGUCUCAGGC | 266 |
| 128117 | CAGGGAACUGAAGCCAUCGG | 267 |
| 128118 | GUCCUUAACGGUGCUCCAGU | 268 |
| 128120 | AAGCAACCUACAGGGGCAGC | 269 |
| 127514 | GAGCAGCUGCCUCUAGGGAU | 270 |
| 127515 | CCUGGAGCAGCUGCCUCUAG | 271 |
| 128121 | ACCUGGAGCAGCUGCCUCUA | 272 |
| 128122 | CCCAGAGGGCAUUACCUGGA | 273 |
| 128123 | CCCUCCCCAGAGGGCAUUAC | 274 |
| 128124 | CCCCUCCCCAGAGGGCAUUA | 275 |
| 128125 | UCCCCUCCCCAGAGGGCAUU | 276 |
| 128126 | UUUCCCCUCCCCAGAGGGCA | 277 |
| 128127 | CUCUUUCCCCUCCCCAGAGG | 278 |
| 128128 | CCCUCCUCUUUCCCCUCCCC | 279 |
| 128129 | CUCCCCUCCUCUUUCCCCUC | 280 |
| 127516 | CUCUUUCCUCAGGAGCUUCA | 281 |
| 127517 | AAGCUCCUGAGGAAAGAGCA | 282 |
| 128130 | AGCCCUGCUCUUUCCUCAGG | 283 |
| 128131 | UUUCCUCAGGAGCUUCAGAG | 284 |
| 128132 | UCCUCAGGAGCUUCAGAGGC | 285 |
| 128133 | CCUCAGGAGCUUCAGAGGCC | 286 |
| 128134 | CUCAGGAGCUUCAGAGGCCG | 287 |
| 128135 | AGGAGCUUCAGAGGCCGAGG | 288 |
| 128136 | UGAAGCUCCUGAGGAAAGAG | 289 |
| 128137 | GGCCUCUGAAGCUCCUGAGG | 290 |
| 127518 | GCCUGCUGGGCCACCUGGGA | 292 |
| 127519 | CCUGGCCUGCUGGGCCACCU | 293 |
| 127520 | UACCUGGCCUGCUGGGCCAC | 294 |
| 127521 | GGGAGGGAGGCCAGCGGGUG | 295 |
| 127522 | CCCCCAGCCCAGUCCCACCA | 296 |
| 128138 | CCCUGCUCUGUUGCUUCCCC | 297 |
| 88586 | GCCUCAGGGUUCAAAUCCCA | 298 |
| 88592 | GCCCUGCAUGAAGCCAAGAA | 299 |
| n/a | AGUUCUGGGAUUUGGACCCU | 823 |
| n/a | GACCCUGAGGUCAGACCAAC | 824 |
| n/a | ACCUCAGGGUCCAAAUCCCA | 825 |
| 133653 | GACAGCCCAGUCCUACCCCA | 1000 |
| 133654 | UUCAGGGCUUGGGGCUGGUG | 1001 |
| 133655 | CCUUUACUCCAAACACCCCC | 1002 |
| 133656 | CCCCCCACCCCUCAUCAUAA | 1003 |
| 133657 | UUCAGUCUGGUGGGUUUUCU | 1004 |
| 133658 | UCACUUGCCCAAAGCUACAC | 1005 |
| 133659 | GUGGGUUUUCUGCUCCAUCC | 1006 |
| 133660 | CCGGAGCCACUGAUGCCUGG | 1007 |
| 133661 | GACUCAGUCUCCUAGGGAUU | 1008 |
| 133662 | GCCUAUGUCCAAGCCAUUUC | 1009 |
| 133663 | CCUCAGGCCCUCAUCUCCAC | 1010 |
| 133664 | UCCAAGCCAUUUCCCCUCUC | 1011 |
| 133665 | AAAGGCUGAGAUGGGCCCGA | 1012 |
| 133666 | AAAUUCCAGUGUGAAAGGCU | 1013 |
| 133667 | GAGAUGAUAUAAAACAGGUC | 1014 |
| 133668 | GGGAGGGGAAAGAGGAGGGG | 1015 |
| 133669 | AAGAACAUGGAGGCCCGGGA | 1016 |
| 133670 | GGGCUGGUGGAGGGAGGGGC | 1017 |
| 133671 | AUGCCUGGUCUUCUGUGCCU | 1018 |
| 133672 | UGUUCAGGGCUUGGGGCUGG | 1019 |
| 133673 | CUCCAGGUAAUGCCCUCUGG | 1020 |
| 133674 | AGGGCUCCCCAGGCCCACCC | 1021 |
| 133675 | UUGGCUGGACUGGACGGAGA | 1022 |
| 133676 | GAGCUAAGGAAGCCUCGGAG | 1023 |
| 133677 | CCCUCUGGGGAGGGGAAAGA | 1024 |
| 133678 | CUCCAAACACCCCCCAGCCC | 1025 |
| 133679 | GGGAGCCAGUCAGCUAGGAA | 1026 |
| 133680 | GGCCCGAGGCCCCUGGCCUA | 1027 |
| 133681 | GAGGCAGCUGCUCCAGGUAA | 1028 |
| 133682 | GAGGGAGGGGCCUGAAAUUC | 1029 |
| 133683 | GAGAGGGCCAGAAAUCACCC | 1030 |
| 133684 | AAGAAGCCCCUCACCCCUCU | 1031 |
| 133685 | CCCCAGACAGGGAAACUGAG | 1032 |
| 133686 | GGGCUGGAAGUGGCUCCAAG | 1033 |
| 133687 | CUCCAGGCUGUGUUCAGGGC | 1034 |
| 133688 | GUCUUCUGUGCCUUUACUCC | 1035 |
| 133689 | CACAGGGGGUGGGGCUGGAA | 1036 |
| 133690 | GACUGGACGGAGAUCAGUCC | 1037 |
| 133691 | GACGGGUGCCCCCCACCCCU | 1038 |
| 133692 | UGUCCAAGCCAUUUCCCCUC | 1039 |
| 133693 | AGAUGGGCCCGAGGCCCCUG | 1040 |
| 133694 | GGUCCUCAGUGCCUGCUGCC | 1041 |
| 133695 | CAGGGCUGGCGGGACAGCAG | 1042 |
| 133696 | CCUUGAUGUUCAGUCUGGUG | 1043 |
| 133697 | AGGCCUGGAGAGGGCCAGAA | 1044 |
| 133698 | CCCUGGAGAUGAUAUAAAAC | 1045 |
| 133699 | ACCUGAAGAACAUGGAGGCC | 1046 |
| 133700 | CCUGGUCUUCUGUGCCUUUA | 1047 |
| 133701 | ACCUUUGCCCAGCGCCCUGG | 1048 |
| 133702 | CCCAAAGCUACACAGGGGGU | 1049 |
| 133703 | GUGGAGGGAGGGGCCUGAAA | 1050 |
| 133704 | UGCCUUUACUCCAAACACCC | 1051 |
| 133705 | CUCCAUCCCACCCACCUCCC | 1052 |
| 133706 | AUGUUCAGUCUGGUGGGUUU | 1053 |
| 133707 | CUAGAGCUAAGGAAGCCUCG | 1054 |
| 133708 | GGAAGGAAUGAGGGCUCCCC | 1055 |
| 133709 | GGCUGCAGGGCUGGCGGGAC | 1056 |
| 133710 | AUGCCCUCUGGGGAGGGGAA | 1057 |
| 133711 | AAACAGGUCAGAACCCUCCU | 1058 |
| 133712 | GGGCUGGAGGAAGCCUUAGA | 1059 |
| 133713 | UUCUCAAGUCUGAAGAAGCC | 1060 |
| 133714 | AGCUCAUCUGGGCUGCAGGG | 1061 |
| 133715 | GGGAUUUCCCAACUCUCCCG | 1062 |
| 133716 | GACGGAGAUCAGUCCAGACC | 1063 |
| 133717 | UGAAAGGCUGAGAUGGGCCC | 1064 |
| 133718 | CCUGUCUGCUCAGUUCAUCC | 1065 |
| 133719 | CAGGUUCCCCCCUCAUUCUU | 1066 |
| 133720 | GUCAGCAGGUGACCUUUGCC | 1067 |
| 133721 | GAGGAAGCCUUAGACAGCCC | 1068 |
| 133722 | CUGCAUCUGGACACCCUGCC | 1069 |
| 133723 | CCCAGCGCCCUGGGUCCUCA | 1070 |
| 133724 | CCCAGCCCAGCCAGCAAGCC | 1071 |
| 133725 | GGUUUUCUGCUCCAUCCCAC | 1072 |
| 133726 | UAAAACAGGUCAGAACCCUC | 1073 |
| 133727 | CUCAGUUCAUCCCUAGAGGC | 1074 |
| 133728 | GACACCCUGCCUCAGGCCCU | 1075 |
| 133729 | GCGGGACAGCAGCGUGGACU | 1076 |
| 133730 | AAGAGGGGCAAGAGGAGCUC | 1077 |
| 133731 | CAUCUGGACACCCUGCCUCA | 1078 |
| 133732 | GAGGCCCGGGAGGGGUGUCA | 1079 |
| 133733 | CCUGCUGCCCUGGAGAUGAU | 1080 |
| 133734 | AGGAAGCCUCGGAGCUGGAC | 1081 |
| 133735 | UCUGCUCAGUUCAUCCCUAG | 1082 |
| 133736 | GAAGUGGCUCCAAGUGCAGG | 1083 |
| 133737 | GCUGGACUGGACGGAGAUCA | 1084 |
| 133738 | GAGAAGCACUUGCUAGAGCU | 1085 |
| 133739 | CUGCCCUGGAGAUGAUAUAA | 1086 |
| 133740 | AUAUAAAACAGGUCAGAACC | 1087 |
| 133741 | GCUCCAAGUGCAGGUUCCCC | 1088 |
| 133742 | GGCUGGGCAGGGAGCUCCUC | 1089 |
| 133743 | GACAUAGGCCAGGGGCCUCG | 1090 |
| 133744 | GGCCUGGGGAGCCCUCAUUC | 1091 |
| 133745 | GGCUGGGGGGUGUUUGGAGU | 1092 |
| 133746 | GGUGGGAUGGAGCAGAAAAC | 1093 |
| 133747 | GCUUGGACAUAGGCCAGGGG | 1094 |
| 133748 | AGGGCCUGAGGCAGGGUGUC | 1095 |
| 133749 | AGGCAGGGUGUCCAGAUGCA | 1096 |
| 133750 | UCCCGCCAGCCCUGCAGCCC | 1097 |
| 133751 | CCCCUCUUCAUCCUCCUCCC | 1098 |
| 133752 | AACAUCAAGGCACCUGCGGU | 1099 |
| 133753 | AGCUCAGGAACUGGGGGUGG | 1100 |
| 133754 | UUCUUCAGGUUAUGAUGAGG | 1101 |
| 133755 | GCUUUGGGCAAGUGACACCC | 1102 |
| 133756 | AGGGGGGAACCUGCACUUGG | 1103 |
| 133757 | GCUUGGGCUGGGGGGUGUUU | 1104 |
| 133758 | AACUGAGCAGACAGGCAGGA | 1105 |
| 133759 | UGUGUCUUUGGGUGAUUUCU | 1106 |
| 133760 | UGAUGAGGGGUGGGGGGCAC | 1107 |
| 133761 | GGCAGGGAGCUCCUCUUGCC | 1108 |
| 133762 | AGGGGUGGGGGGCACCCGUC | 1109 |
| 133763 | CCUGGAGCAGCUGCCUCUAG | 1110 |
| 133764 | GGGAUGAACUGAGCAGACAG | 1111 |
| 133765 | AGGCUUCCUCCAGCCCUAAG | 1112 |
| 133766 | GAGAUGAGGGCCUGAGGCAG | 1113 |
| 133767 | GGAUGGAGCAGAAAACCCAC | 1114 |
| 133768 | AAGAAUGAGGGGGGAACCUG | 1115 |
| 133769 | UUUGGAGUAAAGGCACAGAA | 1116 |
| 133770 | GAGUAGAGGGGUGAGGGGCU | 1117 |
| 133771 | ACCUGUUUUAUAUCAUCUCC | 1118 |
| 133772 | GUGAGAGGGGAAAUGGCUUG | 1119 |
| 133773 | UGUAGCUUUGGGCAAGUGAC | 1120 |
| 133774 | UGUCUUUGGGUGAUUUCUGG | 1121 |
| 133775 | UAUCAUCUCCAGGGCAGCAG | 1122 |
| 133776 | GAGCAGAAAACCCACCAGAC | 1123 |
| 133777 | GGAGACUGAGUCCACGCUGC | 1124 |
| 133778 | CAGCCCAGAUGAGCUCAGGA | 1125 |
| 133779 | GGUGGCUUGGGCUGGGGGGU | 1126 |
| 133780 | AGGGGCUUCUUCAGACUUGA | 1127 |
| 133781 | CACUUGGAGCCACUUCCAGC | 1128 |
| 133782 | CAGCAAGCGGGCGGGAGAGU | 1129 |
| 133783 | GGCAAAGGUCACCUGCUGAC | 1130 |
| 133784 | UCUUUGGGUGAUUUCUGGCC | 1131 |
| 133785 | UCAUCUCCAGGGCAGCAGGC | 1132 |
| 133786 | AGCAGACAGGCAGGAGGGUU | 1133 |
| 133787 | AGGACCCAGGGCGCUGGGCA | 1134 |
| 133788 | GGGGGUGUUUGGAGUAAAGG | 1135 |
| 133789 | GGGUAGGACUGGGCUGUCUA | 1136 |
| 133790 | GGUGAUUUCUGGCCCUCUCC | 1137 |
| 133791 | GAGCAGCUGCCUCUAGGGAU | 1138 |
| 133792 | CUGUGUGUCUUUGGGUGAUU | 1139 |
| 133793 | CUGACCAGUGGAGAUGAGGG | 1140 |
| 133794 | AUGAGGGGUGGGGGGCACCC | 1141 |
| 133795 | UCUAAGGCUUCCUCCAGCCC | 1142 |
| 133796 | GAAUUUCAGGCCCCUCCCUC | 1143 |
| 133797 | AGCCUGAAGAAUGAGGGGGG | 1144 |
| 133798 | GGGGGCACCCGUCCAGCUCC | 1145 |
| 133799 | AAGGCACAGAAGACCAGGCA | 1146 |
| 133800 | ACCAGUGGAGAUGAGGGCCU | 1147 |
| 133801 | GGCUGUCUAAGGCUUCCUCC | 1148 |
| 133802 | GGGGUGGGCCUGGGGAGCCC | 1149 |
| 133803 | UAGCUUUGGGCAAGUGACAC | 1150 |
| 133804 | GAGCCACUUCCAGCCCCACC | 1151 |
| 133805 | AUUUCUGGCCCUCUCCAGGC | 1152 |
| 133806 | ACUGGCUCCCCAGGGAGAGG | 1153 |
| 133807 | GCCCUCUCCAGGCCUCAGUU | 1154 |
| 133808 | GGACUGGGCUGUCUAAGGCU | 1155 |
| 133809 | CUGUCCCGCCAGCCCUGCAG | 1156 |
| 133810 | GGCAAGUGACACCCCUCCCG | 1157 |
| 133811 | AGAACAAGUGGGUGGCUUGG | 1158 |
| 133812 | AACACAGCCUGGAGUAGAGG | 1159 |
| 133813 | UCUGGGGUAGGACUGGGCUG | 1160 |
| 133814 | GAGGGGUGAGGGGCUUCUUC | 1161 |
| 133815 | CGGUCUGGACUGAUCUCCGU | 1162 |
| 133816 | GCUGGGCUGGGCAGGGAGCU | 1163 |
| 133817 | GGGAGCCCUCAUUCCUUCCU | 1164 |
| 133818 | GAGUAAAGGCACAGAAGACC | 1165 |
| 133819 | GCAAGUGCUUCUCCAGGCUU | 1166 |
| 133820 | AGAGGGGAAAUGGCUUGGAC | 1167 |
| 133821 | AGUCCACGCUGCUGUCCCGC | 1168 |
| 133822 | CCUCUAGGGAUGAACUGAGC | 1169 |
| 133823 | GGCCAGGGGCCUCGGGCCCA | 1170 |
| 133824 | CUGGCUGGGCUGGGCAGGGA | 1171 |
| 133825 | AUCUCCGUCCAGUCCAGCCA | 1172 |
| 133826 | GACUGAUCUCCGUCCAGUCC | 1173 |
| 133827 | GGAAAUCCCUAGGAGACUGA | 1174 |
| 133828 | GCUGACUGGCUCCCCAGGGA | 1175 |
| 133829 | ACACCCCUCCCGGGCCUCCA | 1176 |
| 133830 | GCUCUAGCAAGUGCUUCUCC | 1177 |
| 133831 | CUUCUCCAGGCUUGCUGGCU | 1178 |
| 133832 | UUUUAUAUCAUCUCCAGGGC | 1179 |
| 133833 | UCCAGAUGCAGCAAGCGGGC | 1180 |
| 133834 | GCUCCCCAGGGAGAGGCUGG | 1181 |
| 144542 | ACAGGCUCCUUCACAGAAGC | 1182 |
| 144543 | CUCUGCAGAACGGGACAUCU | 1183 |
| 144544 | GCCCCCCCCACACCAGGAAC | 1184 |
| 144545 | AUAUGCUGAGAAACAAUAGG | 1185 |
| 144546 | GGCAGGGAUUAGUGAGAGAA | 1186 |
| 144547 | GACCUCAGGCCUGCUUUACA | 1187 |
| 144548 | CAGAACGGGACAUCUACUCU | 1188 |
| 144549 | GAGUAGCUAGCUGCUUCUAG | 1189 |
| 144550 | GUGCCACUGUGGAGCAACGG | 1190 |
| 144551 | GGGAAUCUGUGGUGCCACUG | 1191 |
| 144552 | GUGAGAGCUUCUCCCUCCAG | 1192 |
| 144553 | GCUCCAGGAUGGGACAGCGG | 1193 |
| 144554 | CUGAGAAACAAUAGGUUUCU | 1194 |
| 144555 | ACCUGUUUUAUAUUGGCUCC | 1195 |
| 144556 | AGAUUGCCCAUGCUUUUCAC | 1196 |
| 144557 | GGGUGGAAGGUGGAGUAUAG | 1197 |
| 144558 | CCAAAGGCUUCUAAUAGCUC | 1198 |
| 144559 | AGACAGGAAAAGACAGGGGA | 1199 |
| 144560 | GACCCAGCCCCCCAAGUGGG | 1200 |
| 144561 | CCGUAGCUGGGCAGGGAUUA | 1201 |
| 144562 | CAGUAGACCCAGCCCCCCAA | 1202 |
| 144563 | GGUGGUGAGAGCUUCUCCCU | 1203 |
| 144564 | GAAUGGAAUGGGGAAUCUGU | 1204 |
| 144565 | GAUGGCUGGGUGGUGAGAGC | 1205 |
| 144566 | UGGAGCAACGGAGGAAGUGG | 1206 |
| 144567 | GCCUCCCUUUCCCCAGCUUC | 1207 |
| 144568 | GGUCAUGAAUCCCAAGCCUU | 1208 |
| 144569 | GCUAGCUGCUUCUAGGGAUA | 1209 |
| 144570 | GCCCAUAGCCUCCCUUUCCC | 1210 |
| 144571 | GAGACCAUGAGUCCCAAGCC | 1211 |
| 144572 | UGACCUGUUUUAUAUUGGCU | 1212 |
| 144573 | CUCUAAUAUGCUGAGAAACA | 1213 |
| 144574 | CCACUGUGGAGCAACGGAGG | 1214 |
| 144575 | ACCUCCACCUGUGAUCCCAA | 1215 |
| 144576 | CUUUACAGCCUAGAGCCAGU | 1216 |
| 144577 | CUGAGCAGUCCAGACCAGAG | 1217 |
| 144578 | AGGCAGGAAGGCCAUGCAGC | 1218 |
| 144579 | UUGGCUCCAGGAUGGGACAG | 1219 |
| 144580 | AAAGCCUUCCAGUAGAAUGG | 1220 |
| 144581 | AUAUUAGAUAGAGAACUACA | 1221 |
| 144582 | CCCAGUGCAAGGCUUUUGGC | 1222 |
| 144583 | UAGAAAUACUCUGCAGAACG | 1223 |
| 144584 | AAUCCCAAGCCUUUCUCCCA | 1224 |
| 144585 | GAUACCAAAGGCUUCUAAUA | 1225 |
| 144586 | AAACUGAGCAGGCAAGCGGG | 1226 |
| 144587 | CUUUUCACGGCCACCUCCGC | 1227 |
| 144588 | AGAAAUCCCUCUGAGAUUGC | 1228 |
| 144589 | GAGUAUAGAAAUACUCUGCA | 1229 |
| 144590 | AAGGUUACAUGCCCCCACAC | 1230 |
| 144591 | UUUCUUCCCUUCCUUCCUCU | 1231 |
| 144592 | UUUUAUAUUGGCUCCAGGAU | 1232 |
| 144593 | GAGCCAGUGACAGGCUCCUU | 1233 |
| 144594 | GAAGGUGGAGUAUAGAAAUA | 1234 |
| 144595 | CCACUACCCAGUGCAAGGCU | 1235 |
| 144596 | GGUUUCUUUUCCUCGCUAGG | 1236 |
| 144597 | AGGUCGGUGAGACAGGAAAA | 1237 |
| 144598 | GAGAACUACAGUAGACCCAG | 1238 |
| 144599 | AGCUGGGCAAAGGUCACCUG | 1239 |
| 144600 | UUAGAUAGAGAACUACAGUA | 1240 |
| 144601 | CAGGCAGCUCUGCCACUACC | 1241 |
| 144602 | CAAGGCUUUUGGCCCAUAGC | 1242 |
| 144603 | AGAGCUUCUCCCUCCAGCUC | 1243 |
| 144604 | GGUAGGCAUGGAUACCAAAG | 1244 |
| 144605 | AGAAACAAUAGGUUUCUUUU | 1245 |
| 144606 | GGGUGGGAGGGGGCAGAGUG | 1246 |
| 144607 | UGCUGAGAAACAAUAGGUUU | 1247 |
| 144608 | GCUGGGCAGGGAUUAGUGAG | 1248 |
| 144609 | AACAAGGGACAGCAUGACCC | 1249 |
| 144610 | GAGCAACGGAGGAAGUGGGG | 1250 |
| 144611 | CCGGCUCACCUAGAUGAGGU | 1251 |
| 144612 | GGACUCAGUUUUUUCAGUCC | 1252 |
| 144613 | GAAAUACUCUGCAGAACGGG | 1253 |
| 144614 | GGCUAGAUGGCUGGGUGGUG | 1254 |
| 144615 | GGAGGGGGCAGAGUGAAGGU | 1255 |
| 144616 | GCUGCUUCUAGGGAUAAAAC | 1256 |
| 144617 | CCUGGAGUAGCUAGCUGCUU | 1257 |
| 144618 | CCAGAGGAGUUGAGAAAUCC | 1258 |
| 144619 | CAGCCAUCUGCCAGAGGAGU | 1259 |
| 144620 | CCCCCACACUGACCUCCACC | 1260 |
| 144621 | GAUAGAGAACUACAGUAGAC | 1261 |
| 144622 | CAUGCCCCCACACUGACCUC | 1262 |
| 144623 | UGAUCCCAACAGUCUCCUCU | 1263 |
| 144624 | AUCCCAACAGUCUCCUCUGC | 1264 |
| 144625 | GAAUGGGGAAUCUGUGGUGC | 1265 |
| 144626 | GCUGGGUGGUGAGAGCUUCU | 1266 |
| 144627 | ACCCAAUUGCAGGCAGCUCU | 1267 |
| 144628 | GGACAGCGGGCACAGAAGGC | 1268 |
| 144629 | GAUGAGGUCGGUGAGACAGG | 1269 |
| 144630 | UGGUGCCACUGUGGAGCAAC | 1270 |
| 144631 | GGCAUGGAUACCAAAGGCUU | 1271 |
| 144632 | AGCAGGCAAGCGGGGAGGGC | 1272 |
| 144633 | AGUCCCAAGCCUUCUGUGGG | 1273 |
| 144634 | AUAGCUCAGAGCAAGCUAAA | 1274 |
| 144635 | GGGAUAAAACUGAGCAGGCA | 1275 |
| 144636 | AGCAGUCCAGACCAGAGCCU | 1276 |
| 144637 | UGGGCUAGAUGGCUGGGUGG | 1277 |
| 144638 | GCUCAGAGCAAGCUAAACAA | 1278 |
| 144639 | CUUCUAGGGAUAAAACUGAG | 1279 |
| 144640 | CCCAUGCUUUUCACGGCCAC | 1280 |
| 144641 | UAUUGGCUCCAGGAUGGGAC | 1281 |
| 144642 | GGCAAAGGUCACCUGCUGAG | 1282 |
| 144643 | CAGCCUAGAGCCAGUGACAG | 1283 |
| 144644 | AAAAGCAUGGGCAAUCUCAG | 1284 |
| 144645 | CUCCAGGUAAUGCCCCUGGG | 1285 |
| 144646 | GCUACUCCAGGUAAUGCCCC | 1286 |
| 144647 | UCCCCUGUCUUUUCCUGUCU | 1287 |
| 144648 | UGCCCGCUGUCCCAUCCUGG | 1288 |
| 144649 | CUCAGUUUUAUCCCUAGAAG | 1289 |
| 144650 | CAGAGUAUUUCUAUACUCCA | 1290 |
| 144651 | CUGUCCCUUGUUUAGCUUGC | 1291 |
| 144652 | GGUGAGCCGGUAGCUGAUCC | 1292 |
| 144653 | CUGGAAGGCUUUCAGGUGGC | 1293 |
| 144654 | GGCCAAAAGCCUUGCACUGG | 1294 |
| 144655 | CCCCUGGGGAGGAGAGGAAG | 1295 |
| 144656 | CUGUAGUUCUCUAUCUAAUA | 1296 |
| 144657 | GGUCUACUGUAGUUCUCUAU | 1297 |
| 144658 | UCUAAUAUCAGUGGGAGAAA | 1298 |
| 144659 | AUCCCUUGGUGGCGGAGGUG | 1299 |
| 144660 | GAUGUCCCGUUCUGCAGAGU | 1300 |
| 144661 | CCUGCUCAGUUUUAUCCCUA | 1301 |
| 144662 | AAACAGGUCACAGCCCUCCC | 1302 |
| 144663 | UCACUGGCUCUAGGCUGUAA | 1303 |
| 144664 | CUCUGAGCUAUUAGAAGCCU | 1304 |
| 144665 | AUCCCUGCCCAGCUACGGCA | 1305 |
| 144666 | GCUUCUGUGAAGGAGCCUGU | 1306 |
| 144667 | UAGUUCUCUAUCUAAUAUCA | 1307 |
| 144668 | CGGCAGAGGAGACUGUUGGG | 1308 |
| 144669 | AAGGAGCCUGUCACUGGCUC | 1309 |
| 144670 | GCCCACAGAAGGCUUGGGAC | 1310 |
| 144671 | UCCCUAGAAGCAGCUAGCUA | 1311 |
| 144672 | CCUACCCAGGACUGAAAAAA | 1312 |
| 144673 | UUGUUUCUCAGCAUAUUAGA | 1313 |
| 144674 | UUGGGAUCACAGGUGGAGGU | 1314 |
| 144675 | GCAGAUGGCUGCAUGGCCUU | 1315 |
| 144676 | CCUCAGGCUCUGGUCUGGAC | 1316 |
| 144677 | ACCUUUGCCCAGCUCACUGG | 1317 |
| 144678 | GUAUCCAUGCCUACCCAGGA | 1318 |
| 144679 | GAAGCCUUUGGUAUCCAUGC | 1319 |
| 144680 | GGGGCAUGUAACCUUCACUC | 1320 |
| 144681 | GGGAAAGGGAGGCUAUGGGC | 1321 |
| 144682 | UGAAGGAGCCUGUCACUGGC | 1322 |
| 144683 | GGGGGGGCUAGAAGCUGGGG | 1323 |
| 144684 | GGUAGUGGCAGAGCUGCCUG | 1324 |
| 144685 | UCCCAUCCUGGAGCCAAUAU | 1325 |
| 144686 | GAAGCUGGGGAAAGGGAGGC | 1326 |
| 144687 | GCUGAUCCCUUGGUGGCGGA | 1327 |
| 144688 | GCGAGGAAAAGAAACCUAUU | 1328 |
| 144689 | GACUGCUCAGCAGGUGACCU | 1329 |
| 144690 | GAAGGCUUUCAGGUGGCUUC | 1330 |
| 144691 | AGGUCCAAGGCUUGUCCCCU | 1331 |
| 144692 | UGGGGGGGGCUAGAAGCUGG | 1332 |
| 144693 | UUUCUCAGCAUAUUAGAGUA | 1333 |
| 144694 | GGCAAUCUCAGAGGGAUUUC | 1334 |
| 144695 | AAGCAGGCCUGAGGUCCAAG | 1335 |
| 144696 | UCUCACCGACCUCAUCUAGG | 1336 |
| 144697 | UCCCGUUCUGCAGAGUAUUU | 1337 |
| 144698 | UCAGUGGGAGAAAGGCUUGG | 1338 |
| 144699 | GAAGCAGCUAGCUACUCCAG | 1339 |
| 144700 | AUAUCAGUGGGAGAAAGGCU | 1340 |
| 144701 | AUGCCCCUGGGGAGGAGAGG | 1341 |
| 144702 | UCCCUUGUUUAGCUUGCUCU | 1342 |
| 144703 | CCCGCUGUCCCAUCCUGGAG | 1343 |
| 144704 | GAGCCAAUAUAAAACAGGUC | 1344 |
| 144705 | GCCUUCCUGCCUCAGGCUCU | 1345 |
| 144706 | GGCUGUAAAGCAGGCCUGAG | 1346 |
| 144707 | UAAAGCAGGCCUGAGGUCCA | 1347 |
| 144708 | GCGGAGGUGGCCGUGAAAAG | 1348 |
| 144709 | AGCCGGUAGCUGAUCCCUUG | 1349 |
| 144710 | GUGGCGGAGGUGGCCGUGAA | 1350 |
| 144711 | UACUCCACCUUCCACCCCAC | 1351 |
| 144712 | GUUCUCUAUCUAAUAUCAGU | 1352 |
| 144713 | CCCAGCUCACUGGGCCUUCU | 1353 |
| 144714 | UGGGCCAAAAGCCUUGCACU | 1354 |
| 144715 | CUCCACCUUCCACCCCACUU | 1355 |
| 144716 | GAGGUCAGUGUGGGGGCAUG | 1356 |
| 144717 | CACUGGGUAGUGGCAGAGCU | 1357 |
| 144718 | CCCAGGACUGAAAAAACUGA | 1358 |
| 144719 | CCUGCAAUUGGGUCAUGCUG | 1359 |
| 144720 | CCCCCUCCCACCCCACUUCC | 1360 |
| 144721 | GGAGAAAGGCUUGGGAUUCA | 1361 |
| 144722 | UAACCUUCACUCUGCCCCCU | 1362 |
| 144723 | CAUGGCCUUCCUGCCUCAGG | 1363 |
| 144724 | UCCAUGCCUACCCAGGACUG | 1364 |
| 144725 | CUCCACAGUGGCACCACAGA | 1365 |
| 144726 | GGCCUUCUGUGCCCGCUGUC | 1366 |
| 144727 | GUCUGGACUGCUCAGCAGGU | 1367 |
| 144728 | CUCAGCAGGUGACCUUUGCC | 1368 |
| 144729 | GCUUGCUCUGAGCUAUUAGA | 1369 |
| 144730 | UCCUUCUCUCACUAAUCCCU | 1370 |
| 144731 | UUAGAGUAGAUGUCCCGUUC | 1371 |
| 144732 | UAAAACAGGUCACAGCCCUC | 1372 |
| 144733 | AGUCCUAGCGAGGAAAAGAA | 1373 |
| 144734 | GAGGGAGAAGCUCUCACCAC | 1374 |
| 144735 | GUCUCCACCCUUGGGUUCCU | 1375 |
| 144736 | CCCAGCUACGGCAGAGGAGA | 1376 |
| 144737 | UUUAGCUUGCUCUGAGCUAU | 1377 |
| 144738 | GGACUCAUGGUCUCCACCCU | 1378 |
| 144739 | GGUCAUGCUGUCCCUUGUUU | 1379 |
| 144740 | GCCGUGAAAAGCAUGGGCAA | 1380 |
| 144741 | UUAGAAGCCUUUGGUAUCCA | 1381 |
| 144742 | GGAUCACAGGUGGAGGUCAG | 1382 |
| 144743 | CAAUUGGGUCAUGCUGUCCC | 1383 |
| 144744 | GCUCUAGGCUGUAAAGCAGG | 1384 |
| 144745 | GGUUCCUGGUGUGGGGGGGG | 1385 |
| 144746 | GUGGCAGAGCUGCCUGCAAU | 1386 |
| 144747 | GCACCACAGAUUCCCCAUUC | 1387 |
| 144748 | UUUCUAUACUCCACCUUCCA | 1388 |
| 144749 | GUGUGGGGGGGGCUAGAAGC | 1389 |
| 144750 | ACCUUCACUCUGCCCCCUCC | 1390 |
| 144751 | GCUGCAUGGCCUUCCUGCCU | 1391 |
| 144752 | UGGGGGCAUGUAACCUUCAC | 1392 |
| 144753 | GGGGGCUGGGUCUACUGUAG | 1393 |
| 144754 | GCAGAGCUGCCUGCAAUUGG | 1394 |
| 144755 | AAAAAACUGAGUCCUAGCGA | 1395 |
| 144756 | AGCUAUUAGAAGCCUUUGGU | 1396 |
| 144757 | GGGAGGAGAGGAAGGAAGGG | 1397 |
| 144758 | UCUUUUCCUGUCUCACCGAC | 1398 |
| 144759 | GAGUAGAUGUCCCGUUCUGC | 1399 |
| PL34554 | CUUACGGGCAGAGGCCAGGA | 2018 |
| PL34555 | CUCUUUCCUCAGGAGCUUCA | 2019 |
| PL34556 | AUUUAGGGGCUGGGUGACCG | 2020 |
| PL34557 | ACUGAUUUAGGGGCUGGGUG | 2021 |
| PL34558 | CUUCCCCUGACUGAUUUAGG | 2022 |
| PL34559 | GAGGCAGCUGCUCCAGGUAA | 2023 |
| PL34560 | CAUGGCACCUCUGUUCCUGC | 2024 |
| PL34561 | GCGCUCCUGGCCUCUGCCCG | 2025 |
| PL34562 | AAGCCAUCGGUCACCCAGCC | 2026 |
| n/a | ACCCUGCAUGAAGCUGAGAA | 2084 |
| n/a | GGAUUUGGACCCUGAGGUCA | 2085 |
| n/a | GUACAAGAGAUAGAAAGACC | 2086 |

### PSCK9 Spacer Sequences

[0150] TABLE 3 and TABLE 4 provide illustrative spacer sequences targeting the PCSK9 gene for use with the compositions, systems, and methods of the disclosure. In particular, TABLE 3 provides spacer sequences suitable for use in combination with an effector protein of SEQ ID NO: 32 or variants thereof (e.g., variants provided in TABLES 18 and 19). In particular, TABLE 4 provides spacer sequences suitable for use in combination with an effector protein of SEQ ID NO: 773 or variants thereof (e.g., variants provided in TABLES 16 and 17). In some embodiments, the spacer sequence comprises at least 70%, at least 80%, at least 90%, at least 91%, at least 92%, at least 93%, at least 94%, at least 95%, at least 96%, at least 97%, or at least 99%, or 100% sequence identity to a sequence as set forth in TABLE 3 or TABLE 4. In some embodiments, spacer sequences comprise at least 10, at least 11, at least 12, at least 13, at least 14, at least 15, at least 16, at least 17, at least 18, at least 19, or at least 20 contiguous nucleotides of a sequence selected from any one of SEQ ID NOs: 79-140, 208, 300-487, 799-803, 809, 822 and 1970-1995.

TABLE 3
Exemplary Spacer Sequences Targeting PCSK9
for CasPhi.12 Effector Proteins

| Target | | Spacer | |
|---|---|---|---|
| Region | Spacer | sequence (5′ to 3′), | SEQ ID |
| of PCSK9 | ID | shown as RNA | NO: |
| Exon #1 | 63561 | CGGUGGGGAGGACUGUG | 79 |
| Exon #1 | 63571 | CGUUCCGAGGAGGACGG | 80 |
| Exon #1 | 63565 | CGAGGAGGACGGCCUGG | 81 |
| Exon #1 | 63562 | GCGCAGCGGUGGAAGGU | 82 |
| Exon #2 | 63554 | AGCACCACCACGUAGGU | 83 |
| Exon #2 | 63553 | GGCCUGCAGGCGGCGGG | 84 |
| Exon #2 | 63552 | GUGAGGUAUCCCCGGCG | 85 |
| Exon #2 | 63556 | UUCCUGGCUUCCUGGUG | 86 |
| Exon #2 | 63551 | ACCAGGAAGCCAGGAAG | 87 |
| Exon #2 | 63557 | CUGGCUUCCUGGUGAAG | 88 |
| Exon #2 | 63558 | CUGGUGAAGAUGAGUGG | 89 |
| Exon #3 | 63550 | CCCCAUGUCGACUACAU | 90 |
| Exon #3 | 63545 | AUCCGCCCGGUACCGUG | 91 |
| Exon #4 | 63541 | CCGGUGGUCACUCUGUA | 92 |
| Exon #4 | 63542 | CCCGGUGGUCACUCUGU | 93 |
| Exon #5 | 63539 | GCCACGCCGGCAUCCCG | 94 |
| Exon #5 | 63537 | GCAGUUGAGCACGCGCA | 95 |
| Exon #5 | 63540 | CCUUGGCAGUUGAGCAC | 96 |
| Exon #6 | 63530 | CCGAAUAAACUCCAGGC | 97 |
| Exon #6 | 63529 | UCCGAAUAAACUCCAGG | 98 |
| Exon #6 | 63532 | AUUCGGAAAAGCCAGCU | 99 |
| Exon #6 | 63534 | UUCGGAAAAGCCAGCUG | 100 |
| Exon #6 | 63531 | GGAAAAGCCAGCUGGUC | 101 |
| Exon #6 | 63536 | UGCUGCUGCCCCUGGCG | 102 |
| Exon #6 | 63533 | AACGCCGCCUGCCAGCG | 103 |
| Exon #6 | 63527 | CCGGCAGCGGUGACCAG | 104 |
| Exon #6 | 63535 | CGGGACGAUGCCUGCCU | 105 |
| Exon #7 | 63515 | GUGGCCCCAACUGUGAU | 106 |
| Exon #7 | 63516 | GUCCCCAAAGUCCCCAG | 107 |
| Exon #7 | 63517 | GGGGACCAACUUUGGCC | 108 |
| Exon #7 | 63518 | GGGACCAACUUUGGCCG | 109 |
| Exon #7 | 63521 | GGCCGCUGUGUGGACCU | 110 |
| Exon #7 | 63520 | GCCGCUGUGUGGACCUC | 111 |
| Exon #7 | 63525 | GCCCCAGGGGAGGACAU | 112 |
| Exon #7 | 63519 | CCCCAGGGGAGGACAUC | 113 |
| Exon #7 | 63523 | GUGCCUCCAGCGACUGC | 114 |
| Exon #8 | 63513 | CAGCCAUGAUGCUGUCU | 115 |
| Exon #8 | 63511 | AGGCAGAGACUGAUCCA | 116 |
| Exon #8 | 63508 | GCAGAGAAGUGGAUCAG | 117 |
| Exon #8 | 63510 | GGCAGAGAAGUGGAUCA | 118 |
| Exon #8 | 63512 | UCUGCCAAAGAUGUCAU | 119 |
| Exon #8 | 63507 | AUGACAUCUUUGGCAGA | 120 |
| Exon #8 | 63514 | CCUGAGGACCAGCGGGU | 121 |
| Exon #8 | 63509 | GGGGUCAGUACCCGCUG | 122 |
| Exon #9 | 63506 | GCAGCUGUUUUGCAGGA | 123 |
| Exon #9 | 63500 | CCACUCCUGGAGAAACU | 124 |
| Exon #9 | 63505 | CUCCAGGAGUGGGAAGC | 125 |
| Exon #9 | 63503 | UCCAGGAGUGGGAAGCG | 126 |
| Exon #10 | 63498 | UGGGGGUGAGGGUGUCU | 127 |
| Exon #10 | 63497 | GGGGGUGAGGGUGUCUA | 128 |
| Exon #10 | 63496 | GGGGUGAGGGUGUCUAC | 129 |
| Exon #10 | 63499 | CCAGGUGCUGCCUGCUA | 130 |
| Exon #11 | 63485 | UGGGUGCCAAGGUCCUC | 131 |
| Exon #11 | 63493 | GCACCCACAAGCCGCCU | 132 |
| Exon #11 | 63484 | GGCUGACCUCGUGGCCU | 133 |
| Exon #11 | 63487 | CAUUCCAGACCUGGGGC | 134 |
| Exon #11 | 63489 | GCAUUCCAGACCUGGGG | 135 |
| Exon #11 | 63486 | ACUUUGCAUUCCAGACC | 136 |
| Exon #11 | 63490 | CAUGCUCCUUGACUUUG | 137 |
| Exon #12 | 63407 | UCGUGGCCUGUGAGGAC | 138 |
| Exon #12 | 63345 | UUCGCUGGUGCUGCCUG | 139 |
| Exon #12 | 63440 | CCAUCUGCUGCCGGAGC | 140 |
| — | n/a | GAGCAACGGCGGAAGGU | 208 |
| — | PL34711 | ACCCACCUGUGCCGCGGCGA | 799 |
| — | PL34712 | CAUGGGGCCAGGAUCCGUGG | 800 |
| — | PL34713 | UGCAGGCCUUGAAGUUGCCC | 801 |
| — | PL34714 | GUCGAGCAGGCCAGCAAGUG | 802 |
| — | PL34715 | CUCCCAGGCCUGGAGUUUAU | 803 |
| — | n/a | GAAAGACGGAGGCAGCCUGG | 809 |

TABLE 4
Exemplary Spacer Sequences Targeting PCSK9 for
CasM.265466 Effector Proteins

| Target | | | Spacer | SEQ |
|---|---|---|---|---|
| Region | | Spacer | sequence (5′ to 3′), | ID |
| of PCSK9 | PAM | ID | shown as RNA | NO: |
| Exon #4 | n/a | 129194 | GAAGCGGGUCCCGUCCUCCU | 300 |
| Exon #4 | n/a | 129195 | UCUAGGAGAUACACCUCCAC | 301 |
| Exon #4 | n/a | 129196 | ACCAUGACCCUGCCCUCGAU | 302 |
| Exon #4 | n/a | 129197 | ACCCUGCCCUCGAUUUCCCG | 303 |
| Exon #4 | n/a | 129198 | CCCUCGAUUUCCCGGUGGUC | 304 |
| Exon #4 | n/a | 129199 | UAUGCUGGUGUCUAGGAGAU | 305 |
| Exon #4 | n/a | 129200 | UGCUGGUGUCUAGGAGAUAC | 306 |
| Exon #4 | n/a | 129201 | GUCACUCUGUAUGCUGGUGU | 307 |
| Exon #4 | n/a | 129202 | UGGAAGCGGGUCCCGUCCUC | 308 |
| Exon #4 | n/a | 129203 | CUGGUGUCUAGGAGAUACAC | 309 |
| Exon #4 | n/a | 129204 | GGAGAUACACCUCCACCAGG | 310 |
| Exon #4 | n/a | 129205 | GUGUCUAGGAGAUACACCUC | 311 |
| Exon #4 | n/a | 129206 | CACCUCCACCAGGCUGCCUC | 312 |
| Exon #4 | n/a | 129207 | GACACCAGCAUACAGAGUGA | 313 |
| Exon #4 | n/a | 129209 | UGCCCGAGGAGGACGGGACC | 314 |
| Exon #4 | n/a | 129210 | GUGGAGGUGUAUCUCCUAGA | 315 |
| Exon #4 | n/a | 129211 | UCUCCUAGACACCAGCAUAC | 316 |
| Exon #4 | n/a | 129213 | CAGAGUGACCACCGGGAAAU | 317 |
| Exon #4 | n/a | 129214 | UAUCUCCUAGACACCAGCAU | 318 |
| Exon #4 | n/a | 129215 | ACCACCGGGAAAUCGAGGGC | 319 |
| Exon #4 | n/a | 129216 | GAGGUGUAUCUCCUAGACAC | 320 |
| Exon #4 | n/a | 129217 | CCCGAGGAGGACGGGACCCG | 321 |
| Exon #5 | n/a | 129171 | CCCUUCCCUUGGCAGUUGAG | 322 |
| Exon #5 | n/a | 129172 | GCAGUUGAGCACGCGCAGGC | 323 |
| Exon #5 | n/a | 129174 | ACCGUGCCCUUCCCUUGGCA | 324 |
| Exon #5 | n/a | 129178 | GCCACGCCGGCAUCCCGGCC | 325 |
| Exon #5 | n/a | 129179 | ACCACCCCUGCCAGGUGGGU | 326 |
| Exon #5 | n/a | 129182 | GCAGGGGUGGUCAGCGGCCG | 327 |
| Exon #5 | n/a | 129183 | CUCAACUGCCAAGGGAAGGG | 328 |
| Exon #5 | n/a | 129189 | GUCAGCGGCCGGGAUGCCGG | 329 |
| Exon #5 | n/a | 129192 | CGCGUGCUCAACUGCCAAGG | 330 |
| Exon #5 | n/a | 129193 | GCACCCACCUGGCAGGGGUG | 331 |
| Exon #6 | n/a | 129138 | CCGGCAGCGGUGACCAGCAC | 332 |
| Exon #6 | n/a | 129139 | GCUUUUCCGAAUAAACUCCA | 333 |
| Exon #6 | n/a | 129140 | UACCCACCCGCCAGGGGCAG | 334 |
| Exon #6 | n/a | 129141 | GACCAGCUGGCUUUUCCGAA | 335 |
| Exon #6 | n/a | 129142 | CCCACCCGCCAGGGGCAGCA | 336 |
| Exon #6 | n/a | 129143 | GGGAGUAGAGGCAGGCAUCG | 337 |
| Exon #6 | n/a | 129145 | ACCAGCACGACCCCAGCCCU | 338 |
| Exon #6 | n/a | 129146 | GAGGCAGGCAUCGUCCCGGA | 339 |
| Exon #6 | n/a | 129150 | CCCCUGGCGGGUGGGUACAG | 340 |
| Exon #6 | n/a | 129151 | GGGUCGUGCUGGUCACCGCU | 341 |
| Exon #6 | n/a | 129152 | CUGGUCACCGCUGCCGGCAA | 342 |
| Exon #6 | n/a | 129153 | GUCACCGCUGCCGGCAACUU | 343 |
| Exon #6 | n/a | 129154 | CUGCCCCUGGCGGGUGGGUA | 344 |
| Exon #6 | n/a | 129156 | GAGUUUAUUCGGAAAAGCCA | 345 |
| Exon #6 | n/a | 129157 | GCGAGGGCUGGGGUCGUGCU | 346 |
| Exon #6 | n/a | 129158 | CUGCUGCCCCUGGCGGGUGG | 347 |
| Exon #6 | n/a | 129160 | UUCGGAAAAGCCAGCUGGUC | 348 |
| Exon #6 | n/a | 129163 | CCUGCCUCUACUCCCCAGCC | 349 |
| Exon #6 | n/a | 129165 | CCAGCGCCUGGCGAGGGCUG | 350 |
| Exon #6 | n/a | 129167 | CCGGCAACUUCCGGGACGAU | 351 |
| Exon #7 | n/a | 129107 | UCCUCCCCUGGGGCAAAGAG | 352 |
| Exon #7 | n/a | 129108 | GAGGCACCAAUGAUGUCCUC | 353 |
| Exon #7 | n/a | 129109 | GGCAUUGGUGGCCCCAACUG | 354 |
| Exon #7 | n/a | 129110 | AUGUCCUCCCCUGGGGCAAA | 355 |
| Exon #7 | n/a | 129111 | ACACAAAGCAGGUGCUGCAG | 356 |
| Exon #7 | n/a | 129112 | GUGGCCCCAACUGUGAUGAC | 357 |
| Exon #7 | n/a | 129113 | CUGCAGUCGCUGGAGGCACC | 358 |
| Exon #7 | n/a | 129115 | CAGUCGCUGGAGGCACCAAU | 359 |
| Exon #7 | n/a | 129118 | GUCCCCAAAGUCCCCAGGGU | 360 |
| Exon #7 | n/a | 129120 | GGGCAAAGAGGUCCACACAG | 361 |
| Exon #7 | n/a | 129122 | GUGCCUCCAGCGACUGCAGC | 362 |
| Exon #7 | n/a | 129124 | CCUCCAGCGACUGCAGCACC | 363 |
| Exon #7 | n/a | 129125 | GCCGCUGUGUGGACCUCUUU | 364 |
| Exon #7 | n/a | 129127 | GACCUCUUUGCCCCAGGGGA | 365 |
| Exon #7 | n/a | 129129 | ACCCUGGGGACUUUGGGGAC | 366 |
| Exon #7 | n/a | 129131 | UGGACCUCUUUGCCCCAGGG | 367 |
| Exon #7 | n/a | 129132 | CAGCACCUGCUUUGUGUCAC | 368 |
| Exon #7 | n/a | 129134 | GGGACCAACUUUGGCCGCUG | 369 |
| Exon #7 | n/a | 129135 | GGGACUUUGGGGACCAACUU | 370 |
| Exon #7 | n/a | 129136 | UGUGGACCUCUUUGCCCCAG | 371 |
| Exon #7 | n/a | 129137 | CCCCAGGGGAGGACAUCAUU | 372 |
| Exon #8 | n/a | 129076 | GAUCAGUCUCUGCCUCAACU | 373 |
| Exon #8 | n/a | 129080 | GCAGAGAAGUGGAUCAGUCU | 374 |
| Exon #8 | n/a | 129081 | AGCUCCGGCUCGGCAGACAG | 375 |
| Exon #8 | n/a | 129082 | GUCCUCAGGGAACCAGGCCU | 376 |
| Exon #8 | n/a | 129083 | AUGACAUCUUUGGCAGAGAA | 377 |
| Exon #8 | n/a | 129084 | ACAUCUUUGGCAGAGAAGUG | 378 |
| Exon #8 | n/a | 129089 | CUGUCUGCCGAGCCGGAGCU | 379 |
| Exon #8 | n/a | 129091 | CAGCCAUGAUGCUGUCUGCC | 380 |
| Exon #8 | n/a | 129092 | AUCCACUUCUCUGCCAAAGA | 381 |
| Exon #8 | n/a | 129094 | AGGCCUGGUUCCCUGAGGAC | 382 |
| Exon #8 | n/a | 129096 | AUGCUGUCUGCCGAGCCGGA | 383 |
| Exon #8 | n/a | 129099 | AGGCAGAGACUGAUCCACUU | 384 |
| Exon #8 | n/a | 129101 | CCAAAGAUGUCAUCAAUGAG | 385 |
| Exon #8 | n/a | 129102 | UCUGCCGAGCCGGAGCUCAC | 386 |
| Exon #8 | n/a | 129103 | GCCGAGUUGAGGCAGAGACU | 387 |
| Exon #8 | n/a | 129104 | UCAUCAAUGAGGCCUGGUUC | 388 |
| Exon #9 | n/a | 129051 | UGGCCAUCCGUGUAGGCCCC | 389 |
| Exon #9 | n/a | 129053 | GAGCAGCUCAGCAGCUCCUC | 390 |
| Exon #9 | n/a | 129054 | CGCUCGCCCCGCCGCUUCCC | 391 |
| Exon #9 | n/a | 129056 | GAGAAACUGGAGCAGCUCAG | 392 |
| Exon #9 | n/a | 129057 | GCCAUCCGUGUAGGCCCCGA | 393 |
| Exon #9 | n/a | 129058 | UAGGCCCCGAGUGUGCUGAC | 394 |
| Exon #9 | n/a | 129059 | GGCCCCGAGUGUGCUGACCA | 395 |
| Exon #9 | n/a | 129061 | GGAAGCGGCGGGGCGAGCGC | 396 |
| Exon #9 | n/a | 129062 | CUGAGCUGCUCCAGUUUCUC | 397 |
| Exon #9 | n/a | 129065 | UGGUCAGCACACUCGGGGCC | 398 |
| Exon #9 | n/a | 129068 | CUCCAGUUUCUCCAGGAGUG | 399 |
| Exon #9 | n/a | 129070 | GCAGCUGUUUUGCAGGACUG | 400 |
| Exon #9 | n/a | 129071 | AGGAGCUGCUGAGCUGCUCC | 401 |
| Exon #9 | n/a | 129074 | AGCUGCUCCAGUUUCUCCAG | 402 |
| Exon #9 | n/a | 129075 | GUCAGCACACUCGGGGCCUA | 403 |
| Exon #10 | n/a | 129012 | GAGCUGUGUGGACGCUGCAG | 404 |
| Exon #10 | n/a | 129013 | GCAGUGGACACGGGUCCCCA | 405 |
| Exon #10 | n/a | 129014 | GCGUAGACACCCUCACCCCC | 406 |
| Exon #10 | n/a | 129018 | GACACCCUCACCCCCAAAAG | 407 |
| Exon #10 | n/a | 129022 | GACACGGGUCCCCAUGCUGG | 408 |
| Exon #10 | n/a | 129023 | GGGUAGCAGGCAGCACCUGG | 409 |
| Exon #10 | n/a | 129024 | GCAGGCAGCACCUGGCAAUG | 410 |
| Exon #10 | n/a | 129025 | GUGGAGCUGUGUGGACGCUG | 411 |
| Exon #10 | n/a | 129026 | GCAAUGGCGUAGACACCCUC | 412 |
| Exon #10 | n/a | 129034 | CCAGGUGCUGCCUGCUACCC | 413 |
| Exon #10 | n/a | 129038 | GGGGUGAGGGUGUCUACGCC | 414 |
| Exon #10 | n/a | 129041 | CGCCAUUGCCAGGUGCUGCC | 415 |
| Exon #10 | n/a | 129043 | AGGGUGUCUACGCCAUUGCC | 416 |
| Exon #10 | n/a | 129044 | UCUACGCCAUUGCCAGGUGC | 417 |
| Exon #10 | n/a | 129046 | CCGGGCCCACAACGCUUUUG | 418 |
| Exon #10 | n/a | 129047 | CAGCGUCCACACAGCUCCAC | 419 |
| Exon #10 | n/a | 129048 | GGGACCCGUGUCCACUGCCA | 420 |
| Exon #11 | n/a | 128978 | UGGGUGCCAAGGUCCUCCAC | 421 |
| Exon #11 | n/a | 128979 | CCAAGGUCCUCCACCUCCCA | 422 |
| Exon #11 | n/a | 128981 | ACUUUGCAUUCCAGACCUGG | 423 |
| Exon #11 | n/a | 128982 | GCAGCAGGAAGCGUGGAUGC | 424 |
| Exon #11 | n/a | 128986 | GGCUGACCUCGUGGCCUCAG | 425 |
| Exon #11 | n/a | 128987 | GCCUCAGCACAGGCGGCUUG | 426 |
| Exon #11 | n/a | 128989 | ACCUCGUGGCCUCAGCACAG | 427 |
| Exon #11 | n/a | 128990 | CUCCUUGACUUUGCAUUCCA | 428 |
| Exon #11 | n/a | 128991 | CAUUCCAGACCUGGGGCAUG | 429 |
| Exon #11 | n/a | 128992 | GGUGCCAAGGUCCUCCACCU | 430 |
| Exon #11 | n/a | 128993 | GUUGGGCUGACCUCGUGGCC | 431 |
| Exon #11 | n/a | 128994 | GGGCAUGGCAGCAGGAAGCG | 432 |
| Exon #11 | n/a | 128995 | AGGGGCCGGGAUUCCAUGCU | 433 |
| Exon #11 | n/a | 128996 | UGCUGAGGCCACGAGGUCAG | 434 |
| Exon #11 | n/a | 128998 | GCACCCACAAGCCGCCUGUG | 435 |
| Exon #11 | n/a | 128999 | CCCCAGGUCUGGAAUGCAAA | 436 |
| Exon #11 | n/a | 129002 | GAGGACCUUGGCACCCACAA | 437 |
| Exon #11 | n/a | 129003 | CUGAGGCCACGAGGUCAGCC | 438 |
| Exon #11 | n/a | 129004 | GAAUGCAAAGUCAAGGAGCA | 439 |
| Exon #11 | n/a | 129005 | CCAUGCCCCAGGUCUGGAAU | 440 |
| Exon #11 | n/a | 129006 | CUGCCAUGCCCCAGGUCUGG | 441 |
| Exon #11 | n/a | 129007 | GGAGGUGGAGGACCUUGGCA | 442 |
| Exon #11 | n/a | 129008 | AGGCCACGAGGUCAGCCCAA | 443 |
| Exon #11 | n/a | 129009 | CAAAGUCAAGGAGCAUGGAA | 444 |
| Exon #11 | n/a | 129010 | CAGCUCCCACUGGGAGGUGG | 445 |
| Exon #11 | n/a | 129011 | GAAUCCCGGCCCCUCAGGAG | 446 |
| Exon #12 | n/a | 128864 | GCUGUAAAAAGGCAACAGAG | 447 |
| Exon #12 | n/a | 128865 | CAAAAGCAAAACAGGUCUAG | 448 |
| Exon #12 | n/a | 128867 | AAUGUCUGCUUGCUUGGGUG | 449 |
| Exon #12 | n/a | 128868 | AAAAUGCUACAAAACCCAGA | 450 |
| Exon #12 | n/a | 128870 | CUUGCUUGGGUGGGGCUGGU | 451 |
| Exon #12 | n/a | 128871 | CUACAAAACCCAGAAUAAAU | 452 |
| Exon #12 | n/a | 128876 | UCUGCUUGCUUGGGUGGGGC | 453 |
| Exon #12 | n/a | 128878 | GGUGGGGCUGGUGCUCAAGG | 454 |
| Exon #12 | n/a | 128879 | AAAAGGCAACAGAGAGGACA | 455 |
| Exon #12 | n/a | 128881 | AUAAAAAUGCUACAAAACCC | 456 |
| Exon #12 | n/a | 128882 | GUCUGUGUUCCCCUUCCCAG | 457 |
| Exon #12 | n/a | 128883 | UUCCCCUUCCCAGCCUCACU | 458 |
| Exon #12 | n/a | 128884 | UAAAAAGGCAACAGAGAGGA | 459 |
| Exon #12 | n/a | 128885 | UCUUCAAGUUACAAAAGCAA | 460 |
| Exon #12 | n/a | 128887 | GUGCUCAAGGAGGGACAGUU | 461 |
| Exon #12 | n/a | 128889 | GGGCUGGUGCUCAAGGAGGG | 462 |
| Exon #12 | n/a | 128891 | CUUGGGUGGGGCUGGUGCUC | 463 |
| Exon #12 | n/a | 128892 | CAAAACCCAGAAUAAAUAUC | 464 |
| Exon #12 | n/a | 128893 | UGUUCCCCUUCCCAGCCUCA | 465 |
| Exon #12 | n/a | 128894 | GACCUGUUUUGCUUUUGUAA | 466 |
| Exon #12 | n/a | 128896 | CUUUUGUAACUUGAAGAUAU | 467 |
| Exon #12 | n/a | 128897 | UCCUCUCUGUUGCCUUUUUA | 468 |
| Exon #12 | n/a | 128898 | GGUCUGUCCUCUCUGUUGCC | 469 |
| Exon #12 | n/a | 128904 | UUCUGGGUUUUGUAGCAUUU | 470 |
| Exon #12 | n/a | 128908 | UCCCUCCUUGAGCACCAGCC | 471 |
| Exon #12 | n/a | 128909 | AAGAUAUUUAUUCUGGGUUU | 472 |
| Exon #12 | n/a | 128914 | UUUAUUCUGGGUUUUGUAGC | 473 |
| Exon #12 | n/a | 128916 | ACUUGAAGAUAUUUAUUCUG | 474 |
| Exon #12 | n/a | 128917 | AGGCUGGGAAGGGGAACACA | 475 |
| Exon #12 | n/a | 128920 | UCUUUUGGGUCUGUCCUCUC | 476 |
| Exon #12 | n/a | 128921 | UUUUGCUUUUGUAACUUGAA | 477 |
| Exon #12 | n/a | 128923 | GGUUUUGUAGCAUUUUUAUU | 478 |
| Exon #12 | n/a | 128925 | AGCACCAGCCCCACCCAAGC | 479 |
| Exon #12 | n/a | 128929 | GGAAGGGGAACACAGACCAG | 480 |
| Exon #12 | n/a | 128930 | CCGGCUCCGGCAGCAGAUGG | 481 |
| Exon #12 | n/a | 128933 | GGAGGUCCCAGGGAGGGCAC | 482 |
| Exon #12 | n/a | 128950 | GGAUGGGGCUGUCACUGGAG | 483 |
| Exon #12 | n/a | 128960 | CAGUGCCCUCCCUGGGACCU | 484 |
| Exon #12 | n/a | 128964 | CCAUCUGCUGCCGGAGCCGG | 485 |
| Exon #12 | n/a | 128969 | ACAGCCCCAUCCCAGGAUGG | 486 |
| Exon #12 | n/a | 128977 | CUGCCGGAGCCGGCACCUGG | 487 |
| — | n/a | n/a | UAGAACCUUGAUGACAUAGC | 822 |
| — | TCTA | PL34563 | CACCCGCACCUUGGCGCAGC | 1970 |
| — | TTTA | PL34564 | GGGCCAGGAUCCGUGGAGGU | 1971 |
| — | TATA | PL34565 | GCUCACCAGCUCCAGCAGGU | 1972 |
| — | ATTA | PL34566 | GCUUCUGCAGGCCUUGAAGU | 1973 |
| — | TTTA | PL34567 | GGGGUCUUACCGGGGGGCUG | 1974 |
| — | AGTG | PL34568 | GAAAGACGGAGGCAGCCUGG | 1975 |
| — | TTTA | PL34569 | CUUACCUGUCUGUGGAAGCG | 1976 |
| — | TATA | PL34570 | UUCGUCGAGCAGGCCAGCAA | 1977 |
| — | TGTA | PL34571 | GGGCCAUCACUUACCUAUGA | 1978 |
| — | TTTA | PL34572 | UUCCUCCCAGGCCUGGAGUU | 1979 |
| — | GGTA | PL34573 | AUGACCUGGAAAGGUGAGGA | 1980 |
| — | TCTA | PL34574 | CACCAGGCAUUGCAGCCAUG | 1981 |
| — | ATTA | PL34575 | CUUACCUGCCCCAUGGGUGC | 1982 |
| — | AATA | PL34576 | CAGUCACCUCCAUGCGCUCG | 1983 |
| — | CTTG | PL34577 | ACUCUAAGGCCCAAGGGGGC | 1984 |
| — | AATA | PL34578 | CCCCAGGCUGCAGCUCCCAC | 1985 |
| — | GGTA | PL34579 | GCAGGUGACCGUGGCCUGCG | 1986 |
| — | AATG | PL34580 | CCUCGCCGCGGCACAGGUGG | 1987 |
| — | GTTG | PL34581 | CCAGGCAACCUCCACGGAUC | 1988 |
| — | TATG | PL34582 | GCGACCUGCUGGAGCUGGUG | 1989 |
| — | TCTA | PL34583 | AGUGGCGACCUGCUGGAGCU | 1990 |
| — | ACTG | PL34584 | ACUGUCACACUUGCUGGCCU | 1991 |
| — | AGTG | PL34585 | CUCCCCAGCCUCAGCUCCCG | 1992 |
| — | CCTG | PL34586 | GCCCCAACUGUGAUGACCUG | 1993 |
| — | ACTG | PL34587 | CCCCCCAGCACCCAUGGGGC | 1994 |
| — | CCTG | PL34588 | CAAAACAGCUGCCAACCUGC | 1995 |

### ANGPTL3 Spacer Sequences

[0151] TABLES 5 and 6 provides illustrative spacer sequences targeting the ANGPTL3 gene for use with the compositions, systems, and methods of the disclosure. In particular, TABLE 5 provides spacer sequences suitable for use in combination with an effector protein of SEQ ID NO: 32 or variants thereof (e.g., variants provided in TABLES 18 and 19). In particular, TABLE 6 provides spacer sequences suitable for use in combination with an effector protein of SEQ ID NO: 773 or variants thereof (e.g., variants provided in TABLES 16 and 17). In some embodiments, the spacer sequence comprises at least 70%, at least 80%, at least 90%, at least 91%, at least 92%, at least 93%, at least 94%, at least 95%, at least 96%, at least 97%, or at least 99%, or 100% sequence identity to a sequence as set forth in TABLES 5 and 6. In some embodiments, spacer sequences comprise at least 10, at least 11, at least 12, at least 13, at least 14, at least 15, at least 16, at least 17, at least 18, at least 19, or at least 20 contiguous nucleotides of a sequence selected from any one of SEQ ID NOs: 806-808 and 1996-2017.

TABLE 5
Exemplary Spacer Sequences Targeting ANGPTL3
for CasPhi.12 Effector Proteins

| | Spacer sequence (5′ to 3′), | |
|---|---|---|
| Spacer ID | shown as RNA | SEQ ID NO: |
| PL34718 | UACUUACUUUAAGUGAAGUU | 806 |
| PL34719 | UAUCAGCUCAGAAGGACUAG | 807 |
| PL34720 | AUUCUAGGCAUUCCUGCUGA | 808 |

TABLE 6
Exemplary Spacer Sequences Targeting ANGPTL3
for CasM.265466 Effector Proteins

| | | Spacer sequence | |
|---|---|---|---|
| Spacer | | (5′ to 3′), shown as | SEQ ID |
| ID | PAM | RNA | NO: |
| PL34532 | GTTG | CUUACUUUAAGUGAAGUUAC | 1996 |
| PL34533 | CCTA | UUUUCUACUUACUUUAAGUG | 1997 |
| PL34534 | GCTG | UCCAGACUUUUGUAGAAAAA | 1998 |
| PL34535 | CCTG | AAAUACUGACUUACCUGAUU | 1999 |
| PL34536 | ACTG | UCAGCUCAGAAGGACUAGUA | 2000 |
| PL34537 | CCTA | UCUUACCAUCAUGUUUUACA | 2001 |
| PL34538 | CATG | UUGAUUCUAGGCAUUCCUGC | 2002 |
| PL34539 | GGTG | UUCAGGUAGUCCAUGGACAU | 2003 |
| PL34540 | TCTG | GUCCCCUUACCAUCAAGCCU | 2004 |
| PL34541 | GATG | AAACUUUUCUUUUCAGGAGA | 2005 |
| PL34542 | CTTG | UCAGAAAAAGAUACCUGAAU | 2006 |
| PL34543 | CGTG | UCUCCUUUAGGAGGCUGGUG | 2007 |
| PL34544 | TGTG | UCUUGUUUUUCUACAAAAGU | 2008 |
| PL34545 | TCTG | AAAGAAAUAGAAAAUCAGGU | 2009 |
| PL34546 | TTTG | AAUACUAGUCCUUCUGAGCU | 2010 |
| PL34547 | TGTG | AGAAAUGUAAAACAUGAUGG | 2011 |
| PL34548 | CCTG | CAUUCAGCAGGAAUGCCUAG | 2012 |
| PL34549 | CCTG | GUGGUACAUUCAGCAGGAAU | 2013 |
| PL34550 | GGTA | AAUUAAUGUCCAUGGACUAC | 2014 |
| PL34551 | TTTG | GUUUUGGGAGGCUUGAUGGU | 2015 |
| PL34552 | TCTG | GGCCCAACCAAAAUUCUCCU | 2016 |
| PL34553 | TCTG | UCCAGAGGGUUAUUCAGGUA | 2017 |

[0152] In some embodiments, the spacer sequence comprises one or more nucleobase alterations at one or more positions in any one of the sequences of TABLES 1-13. Alternative nucleobases can be any one or more of A, C, G, T or U, or a deletion, or an insertion. In some embodiments, the U is pseudouracil. By way of non-limiting example, a guanine nucleobase could be replaced with the nucleobase of any one of a cytosine, adenosine, thymine, and uracil. In some instance, the spacer sequence comprises only one nucleobase alterations relative to a sequence of TABLES 1-13. In some instance, the spacer sequence comprises not more than 1, not more than 2, nor more than 3, or not more than 4 nucleobase alterations relative to a sequence of TABLES 1-13.

[0153] Targeting locations listed for any of the spacer sequences provided in TABLES 1-6 or the exemplary guide sequences in TABLES 8-13 should not be construed as limiting targeting locations. For example, a spacer sequence that is listed as targeting exon 1 category should not be construed as limited to a target sequence only in exon 1 and no other location in the APOC3, PCSK9, or ANGPLT3 gene.

### Repeat Sequences

[0154] Guide nucleic acids described herein may comprise one or more repeat sequences. In some embodiments, a repeat sequence comprises a nucleotide sequence that is not complementary to a target sequence of a target nucleic acid. In some embodiments, a repeat sequence comprises a nucleotide sequence that may interact with an effector protein. In some embodiments, a repeat sequence includes a nucleotide sequence that is capable of forming a guide nucleic acid-effector protein complex (e.g., a RNP complex). In some embodiments, the repeat sequence may also be referred to as a “protein-binding segment.”

[0155] In some embodiments, the repeat sequence is between 10 and 50, 12 and 48, 14 and 46, 16 and 44, and 18 and 42 nucleotides in length.

[0156] In some embodiments, a repeat sequence is adjacent to a spacer sequence. In some embodiments, a repeat sequence is followed by a spacer sequence in the 5′ to 3′ direction. In some embodiments, a guide nucleic acid comprises a repeat sequence linked to a spacer sequence, which may be a direct link or by any suitable linker, examples of which are described herein.

[0157] In some embodiments, the repeat sequence is adjacent to an intermediary RNA sequence. In some embodiments, a repeat sequence is 3′ to an intermediary RNA sequence. In some embodiments, an intermediary RNA sequence is followed by a repeat sequence, which is followed by a spacer sequence in the 5′ to 3′ direction. In some embodiments, a repeat sequence is linked to a spacer sequence and/or an intermediary RNA sequence.

[0158] In some embodiments, a guide nucleic acid comprises a repeat sequence that is at least 80%, at least 90%, at least 92%, at least 95%, at least 97%, or at least 99%, or 100% identical to a sequence that is provided in TABLE 7. In some embodiments, guide nucleic acids comprise a repeat sequence, wherein the repeat sequence comprises at least 10, at least 12, at least 14, at least 16, at least 18 or at least 20 contiguous nucleotides of a sequence provided in TABLE 7.

TABLE 7
Exemplary Repeat Sequences

| Repeat sequence | | SEQ |
|---|---|---|
| (shown as RNA), 5′- 3′ | Cas protein | ID NO: |
| GUAGAUUGCUCCUUACGAGGAGAC | CasPhi.12 | 16 |
| CUUUCAAGACUAAUAGAUUGCUCC | CasPhi.12 | 38 |
| UUACGAGGAGAC | | |
| AUAGAUUGCUCCUUACGAGGAGAC | CasPhi.12 | 39 |
| UAGAUUGCUCCUUACGAGGAGAC | CasPhi.12 | 40 |
| AGAUUGCUCCUUACGAGGAGAC | CasPhi.12 | 41 |
| GAUUGCUCCUUACGAGGAGAC | CasPhi.12 | 42 |
| AUUGCUCCUUACGAGGAGAC | CasPhi.12 | 43 |
| AAGGAUGCCAAAC | CasM.265466 | 488 |

[0159] In some embodiments, guide nucleic acids comprise more than one repeat sequence (e.g., two or more, three or more, or four or more repeat sequences). In some embodiments, a guide nucleic acid comprises more than one repeat sequence separated by another sequence of the guide nucleic acid. For example, in some embodiments, a guide nucleic acid comprises two repeat sequences, wherein the first repeat sequence is followed by a spacer sequence, and the spacer sequence is followed by a second repeat sequence in the 5′ to 3′ direction. In some embodiments, the more than one repeat sequences are identical. In some embodiments, the more than one repeat sequences are not identical.

[0160] In some embodiments, the repeat sequence comprises two sequences that are complementary to each other and hybridize to form a double stranded RNA duplex (dsRNA duplex). In some embodiments, the two sequences are not directly linked and hybridize to form a stem loop structure. In some embodiments, the dsRNA duplex comprises 5, 10, 15, 20 or 25 base pairs (bp). In some embodiments, not all nucleotides of the dsRNA duplex are paired, and therefore the duplex forming sequence may include a bulge. In some embodiments, the repeat sequence comprises a hairpin or stem-loop structure, optionally at the 5′ portion of the repeat sequence. In some embodiments, a strand of the stem portion comprises a sequence and the other strand of the stem portion comprises a sequence that is at least partially, complementary. In some embodiments, such sequences may have 65% to 100% complementarity (e.g., at least 65%, at least 70%, at least 75%, at least 80%, at least 85%, at least 90%, at least 95%, or 100% complementarity). In some embodiments, a guide nucleic acid comprises nucleotide sequence that when involved in hybridization events may hybridize over one or more segments such that intervening or adjacent segments are not involved in the hybridization event (e.g., a bulge, a loop structure or hairpin structure, etc.).

[0161] In some embodiments, guide nucleic acids comprise a spacer sequence that is at least 80%, at least 85%, at least 90%, at least 95%, or 100% identical to any one of the sequences as set forth in TABLES 1, 3, and 5; and a repeat sequence that is at least 80%, at least 85%, at least 90%, at least 95%, or 100% identical to any one of SEQ ID NOs: 16 or 38-43.

[0162] In some embodiments, guide nucleic acids comprise a spacer sequence that is at least 80%, at least 85%, at least 90%, at least 95%, or 100% identical to any one of the sequences as set forth in TABLES 2, 4, and 6; and a repeat sequence that is at least 80%, at least 85%, at least 90%, at least 95%, or 100% identical to SEQ ID NO: 488.

### Intermediary Sequences

[0163] Guide nucleic acids described herein may comprise one or more intermediary sequences. In general, an intermediary sequence used in the present disclosure is not transactivated or transactivating. An intermediary sequence may also be referred to as an intermediary RNA, although it may comprise deoxyribonucleotides instead of or in addition to ribonucleotides, and/or modified bases. In general, the intermediary sequence non-covalently binds to an effector protein. In some embodiments, the intermediary sequence forms a secondary structure, for example in a cell, and an effector protein binds the secondary structure.

[0164] In some embodiments, a length of the intermediary sequence is at least 30, 50, 70, 90, 110, 130, 150, 170, 190, or 210 linked nucleotides. In some embodiments, a length of the intermediary sequence is not greater than 30, 50, 70, 90, 110, 130, 150, 170, 190, or 210 linked nucleotides. In some embodiments, the length of the intermediary sequence is about 30 to about 210, about 60 to about 210, about 90 to about 210, about 120 to about 210, about 150 to about 210, about 180 to about 210, about 30 to about 180, about 60 to about 180, about 90 to about 180, about 120 to about 180, or about 150 to about 180 linked nucleotides.

[0165] An intermediary sequence may also comprise or form a secondary structure (e.g., one or more hairpin loops) that facilitates the binding of an effector protein to a guide nucleic acid and/or modification activity of an effector protein on a target nucleic acid (e.g., a hairpin region). An intermediary sequence may comprise from 5′ to 3′, a 5′ region, a hairpin region, and a 3′ region. In some embodiments, the 5′ region may hybridize to the 3′ region. In some embodiments, the 5′ region of the intermediary sequence does not hybridize to the 3′ region.

[0166] In some embodiments, the hairpin region may comprise a first sequence, a second sequence that is reverse complementary to the first sequence, and a stem-loop linking the first sequence and the second sequence. In some embodiments, an intermediary sequence comprises a stem-loop structure comprising a stem region and a loop region. In some embodiments, the stem region is 4 to 8 linked nucleotides in length. In some embodiments, the stem region is 5 to 6 linked nucleotides in length. In some embodiments, the stem region is 4 to 5 linked nucleotides in length. In some embodiments, an intermediary sequence comprises a pseudoknot (e.g., a secondary structure comprising a stem at least partially hybridized to a second stem or half-stem secondary structure). An effector protein may interact with an intermediary sequence comprising a single stem region or multiple stem regions. In some embodiments, the nucleotide sequences of the multiple stem regions are identical to one another. In some embodiments, the nucleotide sequences of at least one of the multiple stem regions is not identical to those of the others. In some embodiments, an intermediary sequence comprises 1, 2, 3, 4, 5 or more stem regions.

[0167] In some embodiments, an intermediary sequence comprises a nucleotide sequence that is at least 65%, at least 70%, at least 75%, at least 80%, at least 85%, at least 90%, at least 95%, at least 97%, or at least 98%, at least 99%, or 100% identical to the sequence: ACAGCUUAUUUGGAAGCUGAAAUGUGAGGUUUAUAACACUCACAAGAAUCCU (SEQ ID NO: 489). In some embodiments, an intermediary sequence comprises at least 5, at least 6, at least 7, at least 8, at least 9, at least 10, at least 20, at least 30, at least 40, at least 45, or at least 50 contiguous nucleotides of any one of SEQ ID NO: 489. Such an intermediary sequence may be useful in a guide nucleic acid that is to be used with an effector protein that is at least 80%, at least 85%, at least 90%, at least 95%, at least 98%, at least 99% or 100% identical to any of SEQ ID NOs: 773-793.

### Handle Sequence

[0168] In some embodiments, compositions, systems and methods described herein comprise the nucleic acid, wherein the nucleic acid comprises a handle sequence. In some embodiments, the handle sequence comprises an intermediary sequence. In some embodiments, the intermediary sequence is at the 3′-end of the handle sequence. In some embodiments, the intermediary sequence is at the 5′-end of the handle sequence. In some embodiments, the handle sequence further comprises one or more of linkers and repeat sequences. In some embodiments, the linker comprises a sequence of 5′-GAAA-3′ (SEQ ID NO: 44). In some embodiments, the intermediary sequence is 5′ to the repeat sequence. In some embodiments, the intermediary sequence is 5′ to the linker. In some embodiments, the intermediary sequence is 3′ to the repeat sequence. In some embodiments, the intermediary sequence is 3′ to the linker. In some embodiments, the repeat sequence is 3′ to the linker. In some embodiments, the repeat sequence is 5′ to the linker.

[0169] In some embodiments, an sgRNA may include a handle sequence having a hairpin region, as well as a linker and a repeat sequence. The sgRNA having a handle sequence can have a hairpin region positioned 3′ of the linker and/or repeat sequence. The sgRNA having a handle sequence can have a hairpin region positioned 5′ of the linker and/or repeat sequence. The hairpin region may include a first sequence, a second sequence that is reverse complementary to the first sequence, and a stem-loop linking the first sequence and the second sequence.

[0170] In some embodiments, an effector protein may recognize a secondary structure of a handle sequence. In some embodiments, at least a portion of the handle sequence interacts with an effector protein described herein. Accordingly, in some embodiments, at least a portion of the intermediary sequence interacts with the effector protein described herein. In some embodiments, both, at least a portion of the intermediary sequence and at least a portion of the repeat sequence, interacts with the effector protein. In general, the handle sequence is capable of interacting (e.g., non-covalent binding) with any one of the effector proteins described herein.

[0171] In some embodiments, the handle sequence of an sgRNA comprises a stem-loop structure comprising a stem region and a loop region. In some embodiments, the stem region is 4 to 8 linked nucleotides in length. In some embodiments, the stem region is 5 to 6 linked nucleotides in length. In some embodiments, the stem region is 4 to 5 linked nucleotides in length. In some embodiments, the sgRNA comprises a pseudoknot (e.g., a secondary structure comprising a stem at least partially hybridized to a second stem or half-stem secondary structure). An effector protein may recognize an sgRNA comprising multiple stem regions. In some embodiments, the nucleotide sequences of the multiple stem regions are identical to one another. In some embodiments, the nucleotide sequences of at least one of the multiple stem regions is not identical to those of the others. In some embodiments, the sgRNA comprises at least 2, at least 3, at least 4, or at least 5 stem regions.

[0172] A handle sequence may include deoxyribonucleosides, ribonucleosides, chemically modified nucleosides, or any combination thereof. In some embodiments, a length of the handle sequence is at least 30, 50, 70, 90, 110, 130, 150, 170, 190, or 210 linked nucleotides. In some embodiments, a length of the handle sequence is not greater than 30, 50, 70, 90, 110, 130, 150, 170, 190, or 210 linked nucleotides. In some embodiments, the length of the handle sequence is about 30 to about 210, about 60 to about 210, about 90 to about 210, about 120 to about 210, about 150 to about 210, about 180 to about 210, about 30 to about 180, about 60 to about 180, about 90 to about 180, about 120 to about 180, or about 150 to about 180 linked nucleotides.

[0173] In some embodiments, the length of a handle sequence in an sgRNA is not greater than 50, 56, 66, 67, 68, 69, 70, 71, 72, 73, 95, or 105 linked nucleotides. In some embodiments, the length of a handle sequence in an sgRNA is about 30 to about 120 linked nucleotides. In some embodiments, the length of a handle sequence in an sgRNA is about 50 to about 105, about 50 to about 95, about 50 to about 73, about 50 to about 71, about 50 to about 70, or about 50 to about 69 linked nucleotides. In some embodiments, the length of a handle sequence in an sgRNA is 56 to 105 linked nucleotides, from 56 to 105 linked nucleotides, 66 to 105 linked nucleotides, 67 to 105 linked nucleotides, 68 to 105 linked nucleotides, 69 to 105 linked nucleotides, 70 to 105 linked nucleotides, 71 to 105 linked nucleotides, 72 to 105 linked nucleotides, 73 to 105 linked nucleotides, or 95 to 105 linked nucleotides. In some embodiments, the length of a handle sequence in an sgRNA is 40 to 70 nucleotides. In some embodiments, the length of a handle sequence in an sgRNA is 50, 56, 66, 67, 68, 69, 70, 71, 72, 73, 95, or 105 linked nucleotides.

[0174] In some embodiments, a handle sequence comprises a nucleotide sequence that is at least 65%, at least 70%, at least 75%, at least 80%, at least 85%, at least 90%, at least 95%, at least 97%, or at least 98%, at least 99%, or 100% identical to the sequence:

(SEQ ID NO: 490)
ACAGCUUAUUUGGAAGCUGAAAUGUGAGGUUUAUAACACUCACAAGAAUC
CUGAAAAAGGAUGCCAAAC.

### Exemplary Guide Nucleic Acids

[0175] In some embodiments, the guide nucleic acids disclosed herein comprise a spacer sequence that is at least 70%, at least 75%, at least 80%, at least 85%, at least 90%, at least 95%, at least 96%, at least 97%, at least 98%, at least 99%, or 100% identical to any one of the sequences as set forth in TABLES 1, 3, and 5, and a repeat sequence that is at least 70%, at least 75%, at least 80%, at least 85%, at least 90%, at least 95%, at least 96%, at least 97%, at least 98%, at least 99%, or 100% identical to any one of SEQ ID NOs: 16 or 38-43.

[0176] Exemplary guide nucleic acid sequences useful for systems, compositions and methods described herein are presented in are provided in TABLES 8-10. In some embodiments, the guide nucleic acid comprises a sequence that is at least 70%, at least 75%, at least 80%, at least 85%, at least 90%, at least 95%, or 100% identical to any one of the sequences of TABLES 8-10. In some embodiments, the guide nucleic acid consists of a sequence that is at least 70%, at least 75%, at least 80%, at least 85%, at least 90%, at least 95%, or 100% identical to any one of the sequences of TABLES 8-10. In some embodiments, the guide nucleic acids provided in TABLES 8-10 comprise an additional “G” at the 5′ end of the sequence. The combination of spacer and repeat sequences provided in TABLES 8-10 are provided for illustrative purposes. It should be understood that these guides can comprise any of the repeat sequences disclosed herein (e.g., any one of SEQ ID NOs: 16, and 38-43). For example, in some embodiments, the guide sequence comprises a spacer sequence selected from any one of SEQ ID NOs: 1-15, 67-72, 79-140, 207-208, 799-809, and 830-999 with a repeat sequence selected from any one of SEQ ID NOs: 16, and 38-43.

TABLE 8
Exemplary Guide Nucleic Acids Targeting APOC3
for CasPhi.12 Effector Proteins

| | | SEQ |
|---|---|---|
| Guide ID | Guide sequence (shown as RNA), 5′- 3′ | ID NO: |
| R15586 | AUAGAUUGCUCCUUACGAGGAGACUCCUUAACGGUGCUCCA | 17 |
| R15587 | AUAGAUUGCUCCUUACGAGGAGACACGGUGCUCCAGUAGUC | 18 |
| R15588 | AUAGAUUGCUCCUUACGAGGAGACAAGCAACCUACAGGGGC | 19 |
| R15589 | AUAGAUUGCUCCUUACGAGGAGACUCCAGCUUUAUUGGGAG | 20 |
| R15590 | AUAGAUUGCUCCUUACGAGGAGACGGGUAUUGAGGUCUCAG | 21 |
| R15591 | AUAGAUUGCUCCUUACGAGGAGACAGCAACCUACAGGGGCA | 22 |
| R15592 | AUAGAUUGCUCCUUACGAGGAGACAGGGAACUGAAGCCAUC | 23 |
| R15593 | AUAGAUUGCUCCUUACGAGGAGACUAAGCAACCUACAGGGG | 24 |
| R15594 | AUAGAUUGCUCCUUACGAGGAGACUUGUCCAGCUUUAUUGG | 25 |
| R15595 | AUAGAUUGCUCCUUACGAGGAGACCAGGGAACUGAAGCCAU | 26 |
| R15596 | AUAGAUUGCUCCUUACGAGGAGACCCUGAAAGACUACUGGA | 27 |
| R15597 | AUAGAUUGCUCCUUACGAGGAGACAAAGGGACAGUAUUCUC | 28 |
| R15598 | AUAGAUUGCUCCUUACGAGGAGACCUUAAAAGGGACAGUAU | 29 |
| R15599 | AUAGAUUGCUCCUUACGAGGAGACAGUUCCCUGAAAGACUA | 30 |
| R15600 | AUAGAUUGCUCCUUACGAGGAGACAUCCCUAGAGGCAGCUG | 31 |
| R17561 | AUAGAUUGCUCCUUACGAGGAGACCCCUCCCCAGAGGGCAU | 73 |
| R17562 | AUAGAUUGCUCCUUACGAGGAGACCCCCUCCCCAGAGGGCA | 74 |
| R17563 | AUAGAUUGCUCCUUACGAGGAGACCUUGCAGGAACAGAGGC | 75 |
| R17565 | AUAGAUUGCUCCUUACGAGGAGACCCUCAGGAGCUUCAGAG | 76 |
| R17566 | AUAGAUUGCUCCUUACGAGGAGACCUCAGGAGCUUCAGAGG | 77 |
| R17567 | AUAGAUUGCUCCUUACGAGGAGACUCAUGCCCUGCUCUGUU | 78 |
| R17564 | AUAGAUUGCUCCUUACGAGGAGACGUGGGACUGGGCUGGGG | 491 |
| n/a | AUUGCUCCUUACGAGGAGACCUUGCAGGAACAGAGGUGCC | 815 |
| n/a | AUUGCUCCUUACGAGGAGACCCUCAGGAGCUUCAGAGGCC | 816 |
| n/a | AUAGAUUGCUCCUUACGAGGAGACCCCAACUCUCCCGCCCG | 1400 |
| n/a | AUAGAUUGCUCCUUACGAGGAGACAGGCUUAGGGCUGGAGG | 1401 |
| n/a | AUAGAUUGCUCCUUACGAGGAGACCCCUCUCACCAGCCUCU | 1402 |
| n/a | AUAGAUUGCUCCUUACGAGGAGACAGGGCUUGGGGCUGGUG | 1403 |
| n/a | AUAGAUUGCUCCUUACGAGGAGACCUCCAAACACCCCCCAG | 1404 |
| n/a | AUAGAUUGCUCCUUACGAGGAGACGGGCUGGAGGAAGCCUU | 1405 |
| n/a | AUAGAUUGCUCCUUACGAGGAGACCCAACUCUCCCGCCCGC | 1406 |
| n/a | AUAGAUUGCUCCUUACGAGGAGACGCUGGACUGGACGGAGA | 1407 |
| n/a | AUAGAUUGCUCCUUACGAGGAGACUCUGCUCCAUCCCACCC | 1408 |
| n/a | AUAGAUUGCUCCUUACGAGGAGACCCCAGCGCCCUGGGUCC | 1409 |
| n/a | AUAGAUUGCUCCUUACGAGGAGACUGUGCCUUUACUCCAAA | 1410 |
| n/a | AUAGAUUGCUCCUUACGAGGAGACCUGCAUCUGGACACCCU | 1411 |
| n/a | AUAGAUUGCUCCUUACGAGGAGACCUAGAGCUAAGGAAGCC | 1412 |
| n/a | AUAGAUUGCUCCUUACGAGGAGACGCCCAGCGCCCUGGGUC | 1413 |
| n/a | AUAGAUUGCUCCUUACGAGGAGACCAGUGUGAAAGGCUGAG | 1414 |
| n/a | AUAGAUUGCUCCUUACGAGGAGACUUCAGGCUUAGGGCUGG | 1415 |
| n/a | AUAGAUUGCUCCUUACGAGGAGACGGGCCUCGAUCCCUCGC | 1416 |
| n/a | AUAGAUUGCUCCUUACGAGGAGACACUCCAAACACCCCCCA | 1417 |
| n/a | AUAGAUUGCUCCUUACGAGGAGACAGUCUGGUGGGUUUUCU | 1418 |
| n/a | AUAGAUUGCUCCUUACGAGGAGACCCCAAAGCUACACAGGG | 1419 |
| n/a | AUAGAUUGCUCCUUACGAGGAGACUGCUCCAUCCCACCCAC | 1420 |
| n/a | AUAGAUUGCUCCUUACGAGGAGACAUGUUCAGUCUGGUGGG | 1421 |
| n/a | AUAGAUUGCUCCUUACGAGGAGACCUGCUCCAUCCCACCCA | 1422 |
| n/a | AUAGAUUGCUCCUUACGAGGAGACAUCCCUAGAGGCAGCUG | 1423 |
| n/a | AUAGAUUGCUCCUUACGAGGAGACGACAGCCCAGUCCUACC | 1424 |
| n/a | AUAGAUUGCUCCUUACGAGGAGACGGGCUGGUGGAGGGAGG | 1425 |
| n/a | AUAGAUUGCUCCUUACGAGGAGACCUGAGCUCAUCUGGGCU | 1426 |
| n/a | AUAGAUUGCUCCUUACGAGGAGACGGCCUCGAUCCCUCGCC | 1427 |
| n/a | AUAGAUUGCUCCUUACGAGGAGACUCAAGUCUGAAGAAGCC | 1428 |
| n/a | AUAGAUUGCUCCUUACGAGGAGACCCCCUCUCACCAGCCUC | 1429 |
| n/a | AUAGAUUGCUCCUUACGAGGAGACUUCUCAAGUCUGAAGAA | 1430 |
| n/a | AUAGAUUGCUCCUUACGAGGAGACCCCCCUCAUUCUUCAGG | 1431 |
| n/a | AUAGAUUGCUCCUUACGAGGAGACGGCUGGGGGGUGUUUGG | 1432 |
| n/a | AUAGAUUGCUCCUUACGAGGAGACGGAAAUCCCUAGGAGAC | 1433 |
| n/a | AUAGAUUGCUCCUUACGAGGAGACAGAACAAGUGGGUGGCU | 1434 |
| n/a | AUAGAUUGCUCCUUACGAGGAGACUAUCAUCUCCAGGGCAG | 1435 |
| n/a | AUAGAUUGCUCCUUACGAGGAGACCAGGCCCCUCCCUCCAC | 1436 |
| n/a | AUAGAUUGCUCCUUACGAGGAGACCCUGGAGCAGCUGCCUC | 1437 |
| n/a | AUAGAUUGCUCCUUACGAGGAGACAGGUUAUGAUGAGGGGU | 1438 |
| n/a | AUAGAUUGCUCCUUACGAGGAGACCUGGCUGGGCUGGGCAG | 1439 |
| n/a | AUAGAUUGCUCCUUACGAGGAGACCUAGCUGACUGGCUCCC | 1440 |
| n/a | AUAGAUUGCUCCUUACGAGGAGACUUCAGACUUGAGAACAA | 1441 |
| n/a | AUAGAUUGCUCCUUACGAGGAGACGAGUAAAGGCACAGAAG | 1442 |
| n/a | AUAGAUUGCUCCUUACGAGGAGACGGCAAGUGACACCCCUC | 1443 |
| n/a | AUAGAUUGCUCCUUACGAGGAGACUGAUGAGGGGUGGGGGG | 1444 |
| n/a | AUAGAUUGCUCCUUACGAGGAGACUGGCCCUCUCCAGGCCU | 1445 |
| n/a | AUAGAUUGCUCCUUACGAGGAGACUUCAGGUUAUGAUGAGG | 1446 |
| n/a | AUAGAUUGCUCCUUACGAGGAGACUAUAUCAUCUCCAGGGC | 1447 |
| n/a | AUAGAUUGCUCCUUACGAGGAGACCCCUCCCCAGAGGGCAU | 1448 |
| n/a | AUAGAUUGCUCCUUACGAGGAGACCCCCUCUUCAUCCUCCU | 1449 |
| n/a | AUAGAUUGCUCCUUACGAGGAGACUCCAGGCUUGCUGGCUG | 1450 |
| n/a | AUAGAUUGCUCCUUACGAGGAGACCACACUGGAAUUUCAGG | 1451 |
| n/a | AUAGAUUGCUCCUUACGAGGAGACCCUGUCUGGGGUAGGAC | 1452 |
| n/a | AUAGAUUGCUCCUUACGAGGAGACGCUCUAGCAAGUGCUUC | 1453 |
| n/a | AUAGAUUGCUCCUUACGAGGAGACCUGGCCCUCUCCAGGCC | 1454 |
| n/a | AUAGAUUGCUCCUUACGAGGAGACAGACUUGAGAACAAGUG | 1455 |
| n/a | AUAGAUUGCUCCUUACGAGGAGACGGAGUAAAGGCACAGAA | 1456 |
| n/a | AUAGAUUGCUCCUUACGAGGAGACCCCCUCCCCAGAGGGCA | 1457 |
| n/a | AUAGAUUGCUCCUUACGAGGAGACGAGCCACUUCCAGCCCC | 1458 |
| n/a | AUAGAUUGCUCCUUACGAGGAGACCUUCCUAGCUGACUGGC | 1459 |
| n/a | AUAGAUUGCUCCUUACGAGGAGACCUCCAGCCCUAAGCCUG | 1460 |
| n/a | AUAGAUUGCUCCUUACGAGGAGACUGACCUGUUUUAUAUCA | 1461 |
| n/a | AUAGAUUGCUCCUUACGAGGAGACCAGCCCCACCCCCUGUG | 1462 |
| n/a | AUAGAUUGCUCCUUACGAGGAGACAGGCCCCUCCCUCCACC | 1463 |
| n/a | AUAGAUUGCUCCUUACGAGGAGACCUUAGCUCUAGCAAGUG | 1464 |
| n/a | AUAGAUUGCUCCUUACGAGGAGACGGGCAAGUGACACCCCU | 1465 |
| n/a | AUAGAUUGCUCCUUACGAGGAGACCCCUGUCUGGGGUAGGA | 1466 |
| n/a | AUAGAUUGCUCCUUACGAGGAGACGGUGAUUUCUGGCCCUC | 1467 |
| n/a | AUAGAUUGCUCCUUACGAGGAGACGGGUGAUUUCUGGCCCU | 1468 |
| n/a | AUAGAUUGCUCCUUACGAGGAGACACACUGGAAUUUCAGGC | 1469 |
| n/a | AUAGAUUGCUCCUUACGAGGAGACGACAUAGGCCAGGGGCC | 1470 |
| n/a | AUAGAUUGCUCCUUACGAGGAGACAUAUCAUCUCCAGGGCA | 1471 |
| n/a | AUAGAUUGCUCCUUACGAGGAGACAUCCUCCUCCCCUCCUC | 1472 |
| n/a | AUAGAUUGCUCCUUACGAGGAGACUCCCACUGAUAUUAGAU | 1473 |
| n/a | AUAGAUUGCUCCUUACGAGGAGACUGGCCCAUAGCCUCCCU | 1474 |
| n/a | AUAGAUUGCUCCUUACGAGGAGACCAGGCAGCUCUGCCACU | 1475 |
| n/a | AUAGAUUGCUCCUUACGAGGAGACCAGUAGAAUGGAAUGGG | 1476 |
| n/a | AUAGAUUGCUCCUUACGAGGAGACUAUUGGCUCCAGGAUGG | 1477 |
| n/a | AUAGAUUGCUCCUUACGAGGAGACCUUCCUCUCCUCCCCAG | 1478 |
| n/a | AUAGAUUGCUCCUUACGAGGAGACCAGUCCUGGGUAGGCAU | 1479 |
| n/a | AUAGAUUGCUCCUUACGAGGAGACCCUGGAGUAGCUAGCUG | 1480 |
| n/a | AUAGAUUGCUCCUUACGAGGAGACCCCAGCUUCUAGCCCCC | 1481 |
| n/a | AUAGAUUGCUCCUUACGAGGAGACUCCCUCCAGCUCUUUGU | 1482 |
| n/a | AUAGAUUGCUCCUUACGAGGAGACCCUUCCUUCCUCUCCUC | 1483 |
| n/a | AUAGAUUGCUCCUUACGAGGAGACCUCGCUAGGACUCAGUU | 1484 |
| n/a | AUAGAUUGCUCCUUACGAGGAGACAGAAAUCCCUCUGAGAU | 1485 |
| n/a | AUAGAUUGCUCCUUACGAGGAGACGUUUCUUCCCUUCCUUC | 1486 |
| n/a | AUAGAUUGCUCCUUACGAGGAGACUUCAGUCCUGGGUAGGC | 1487 |
| n/a | AUAGAUUGCUCCUUACGAGGAGACCCCAUGCUUUUCACGGC | 1488 |
| n/a | AUAGAUUGCUCCUUACGAGGAGACUUCCCUUCCUUCCUCUC | 1489 |
| n/a | AUAGAUUGCUCCUUACGAGGAGACCAUGCCCCCACACUGAC | 1490 |
| n/a | AUAGAUUGCUCCUUACGAGGAGACCUUUUCCUCGCUAGGAC | 1491 |
| n/a | AUAGAUUGCUCCUUACGAGGAGACCCUCGCUAGGACUCAGU | 1492 |
| n/a | AUAGAUUGCUCCUUACGAGGAGACUAUAUUGGCUCCAGGAU | 1493 |
| n/a | AUAGAUUGCUCCUUACGAGGAGACGCUCCAGGAUGGGACAG | 1494 |
| n/a | AUAGAUUGCUCCUUACGAGGAGACCACGGCCACCUCCGCCA | 1495 |
| n/a | AUAGAUUGCUCCUUACGAGGAGACUAGCCCCCCCCACACCA | 1496 |
| n/a | AUAGAUUGCUCCUUACGAGGAGACUUUCAGUCCUGGGUAGG | 1497 |
| n/a | AUAGAUUGCUCCUUACGAGGAGACGGCCCAUAGCCUCCCUU | 1498 |
| n/a | AUAGAUUGCUCCUUACGAGGAGACCUUCCCUUCCUUCCUCU | 1499 |
| n/a | AUAGAUUGCUCCUUACGAGGAGACGACCUCAGGCCUGCUUU | 1500 |
| n/a | AUAGAUUGCUCCUUACGAGGAGACCCCCAGCUUCUAGCCCC | 1501 |
| n/a | AUAGAUUGCUCCUUACGAGGAGACUUUCUUCCCUUCCUUCC | 1502 |
| n/a | AUAGAUUGCUCCUUACGAGGAGACUAGGGAUAAAACUGAGC | 1503 |
| n/a | AUAGAUUGCUCCUUACGAGGAGACAUAUUGGCUCCAGGAUG | 1504 |
| n/a | AUAGAUUGCUCCUUACGAGGAGACACGGCCACCUCCGCCAC | 1505 |
| n/a | AUAGAUUGCUCCUUACGAGGAGACACAGCCUAGAGCCAGUG | 1506 |
| n/a | AUAGAUUGCUCCUUACGAGGAGACACAGAAGCCACCUGAAA | 1507 |
| n/a | AUAGAUUGCUCCUUACGAGGAGACUCAGUCCUGGGUAGGCA | 1508 |
| n/a | AUAGAUUGCUCCUUACGAGGAGACUCACGGCCACCUCCGCC | 1509 |
| n/a | AUAGAUUGCUCCUUACGAGGAGACUCCUCGCUAGGACUCAG | 1510 |
| n/a | AUAGAUUGCUCCUUACGAGGAGACCUCCCACUGAUAUUAGA | 1511 |
| n/a | AUAGAUUGCUCCUUACGAGGAGACUUUUCCUCGCUAGGACU | 1512 |
| n/a | AUAGAUUGCUCCUUACGAGGAGACUGUGGGCUAGAUGGCUG | 1513 |
| n/a | AUAGAUUGCUCCUUACGAGGAGACGCCCAUAGCCUCCCUUU | 1514 |
| n/a | AUAGAUUGCUCCUUACGAGGAGACUAAUAGCUCAGAGCAAG | 1515 |
| n/a | AUAGAUUGCUCCUUACGAGGAGACAGUCCUGGGUAGGCAUG | 1516 |
| n/a | AUAGAUUGCUCCUUACGAGGAGACCAGCCUAGAGCCAGUGA | 1517 |
| n/a | AUAGAUUGCUCCUUACGAGGAGACCUCUCCUCCCCAGGGGC | 1518 |
| n/a | AUAGAUUGCUCCUUACGAGGAGACGAUAGAGAACUACAGUA | 1519 |
| n/a | AUAGAUUGCUCCUUACGAGGAGACGUGGCGGAGGUGGCCGU | 1520 |
| n/a | AUAGAUUGCUCCUUACGAGGAGACGGUCAUGCUGUCCCUUG | 1521 |
| n/a | AUAGAUUGCUCCUUACGAGGAGACGGUUCCUGGUGUGGGGG | 1522 |
| n/a | AUAGAUUGCUCCUUACGAGGAGACUCAGCAUAUUAGAGUAG | 1523 |
| n/a | AUAGAUUGCUCCUUACGAGGAGACUAUCCCUAGAAGCAGCU | 1524 |
| n/a | AUAGAUUGCUCCUUACGAGGAGACUCUAUCUAAUAUCAGUG | 1525 |
| n/a | AUAGAUUGCUCCUUACGAGGAGACCUAUACUCCACCUUCCA | 1526 |
| n/a | AUAGAUUGCUCCUUACGAGGAGACCCCAUUCCAUUCUACUG | 1527 |
| n/a | AUAGAUUGCUCCUUACGAGGAGACCUCCGUUGCUCCACAGU | 1528 |
| n/a | AUAGAUUGCUCCUUACGAGGAGACUCCCCUGUCUUUUCCUG | 1529 |
| n/a | AUAGAUUGCUCCUUACGAGGAGACAUCCCUAGAAGCAGCUA | 1530 |
| n/a | AUAGAUUGCUCCUUACGAGGAGACCACCCCACUUGGGGGGC | 1531 |
| n/a | AUAGAUUGCUCCUUACGAGGAGACUUUCUCAGCAUAUUAGA | 1532 |
| n/a | AUAGAUUGCUCCUUACGAGGAGACCAGGUGGCUUCUGUGAA | 1533 |
| n/a | AUAGAUUGCUCCUUACGAGGAGACCCCAGCUCACUGGGCCU | 1534 |
| n/a | AUAGAUUGCUCCUUACGAGGAGACCUCAGCAUAUUAGAGUA | 1535 |
| n/a | AUAGAUUGCUCCUUACGAGGAGACCAUUCUACUGGAAGGCU | 1536 |
| n/a | AUAGAUUGCUCCUUACGAGGAGACUCCUGUCUCACCGACCU | 1537 |
| n/a | AUAGAUUGCUCCUUACGAGGAGACGUAUCCAUGCCUACCCA | 1538 |
| n/a | AUAGAUUGCUCCUUACGAGGAGACAGGUGGCUUCUGUGAAG | 1539 |
| n/a | AUAGAUUGCUCCUUACGAGGAGACGGAUCACAGGUGGAGGU | 1540 |
| n/a | AUAGAUUGCUCCUUACGAGGAGACUUUAGCUUGCUCUGAGC | 1541 |
| n/a | AUAGAUUGCUCCUUACGAGGAGACGAAGCCUUUGGUAUCCA | 1542 |
| n/a | AUAGAUUGCUCCUUACGAGGAGACCUGUCUCACCGACCUCA | 1543 |
| n/a | AUAGAUUGCUCCUUACGAGGAGACUGUGAAGGAGCCUGUCA | 1544 |
| n/a | AUAGAUUGCUCCUUACGAGGAGACACUCUGCCCCCUCCCAC | 1545 |
| n/a | AUAGAUUGCUCCUUACGAGGAGACUCUCACUAAUCCCUGCC | 1546 |
| n/a | AUAGAUUGCUCCUUACGAGGAGACUACUGGAAGGCUUUCAG | 1547 |
| n/a | AUAGAUUGCUCCUUACGAGGAGACUAUACUCCACCUUCCAC | 1548 |
| n/a | AUAGAUUGCUCCUUACGAGGAGACGCCCAGCUCACUGGGCC | 1549 |
| n/a | AUAGAUUGCUCCUUACGAGGAGACCUCUGAGCUAUUAGAAG | 1550 |
| n/a | AUAGAUUGCUCCUUACGAGGAGACGGGGGCUGGGUCUACUG | 1551 |
| n/a | AUAGAUUGCUCCUUACGAGGAGACGGAUUCAUGACCCAGGA | 1552 |
| n/a | AUAGAUUGCUCCUUACGAGGAGACCCUGCUCAGUUUUAUCC | 1553 |
| n/a | AUAGAUUGCUCCUUACGAGGAGACCUCAACUCCUCUGGCAG | 1554 |
| n/a | AUAGAUUGCUCCUUACGAGGAGACCUGCCUCAGGCUCUGGU | 1555 |
| n/a | AUAGAUUGCUCCUUACGAGGAGACUGUGCCCGCUGUCCCAU | 1556 |
| n/a | AUAGAUUGCUCCUUACGAGGAGACUCCUUCUCUCACUAAUC | 1557 |
| n/a | AUAGAUUGCUCCUUACGAGGAGACGCUUGCUCUGAGCUAUU | 1558 |
| n/a | AUAGAUUGCUCCUUACGAGGAGACUCAACUCCUCUGGCAGA | 1559 |
| n/a | AUAGAUUGCUCCUUACGAGGAGACCCUGUCUCACCGACCUC | 1560 |
| n/a | AUAGAUUGCUCCUUACGAGGAGACCUCCACAGUGGCACCAC | 1561 |
| n/a | AUAGAUUGCUCCUUACGAGGAGACUCCCUAGAAGCAGCUAG | 1562 |
| n/a | AUAGAUUGCUCCUUACGAGGAGACGGACUCAUGGUCUCCAC | 1563 |
| n/a | AUAGAUUGCUCCUUACGAGGAGACAGCUUGCUCUGAGCUAU | 1564 |
| n/a | AUAGAUUGCUCCUUACGAGGAGACGGUAUCCAUGCCUACCC | 1565 |
| n/a | AUAGAUUGCUCCUUACGAGGAGACCUGGUGUGGGGGGGGCU | 1566 |
| n/a | AUAGAUUGCUCCUUACGAGGAGACCACUGGGUAGUGGCAGA | 1567 |
| n/a | AUAGAUUGCUCCUUACGAGGAGACUGCAGAGUAUUUCUAUA | 1568 |
| n/a | AUAGAUUGCUCCUUACGAGGAGACGAGUAGAUGUCCCGUUC | 1569 |

TABLE 9
Exemplary Guide Nucleic Acids Targeting PCSK9
for CasPhi.12 Effector Proteins

| Guide | | SEQ ID |
|---|---|---|
| ID | Guide sequence (shown as RNA), 5′- 3′ | NO: |
| R14046 | AUAGAUUGCUCCUUACGAGGAGACCGGUGGGGAGGACUGUG | 141 |
| R14049 | AUAGAUUGCUCCUUACGAGGAGACCGUUCCGAGGAGGACGG | 142 |
| R14050 | AUAGAUUGCUCCUUACGAGGAGACCGAGGAGGACGGCCUGG | 143 |
| R14051 | AUAGAUUGCUCCUUACGAGGAGACGCGCAGCGGUGGAAGGU | 144 |
| R14052 | AUAGAUUGCUCCUUACGAGGAGACAGCACCACCACGUAGGU | 145 |
| R14053 | AUAGAUUGCUCCUUACGAGGAGACGGCCUGCAGGCGGCGGG | 146 |
| R14054 | AUAGAUUGCUCCUUACGAGGAGACGUGAGGUAUCCCCGGCG | 147 |
| R14056 | AUAGAUUGCUCCUUACGAGGAGACUUCCUGGCUUCCUGGUG | 148 |
| R14057 | AUAGAUUGCUCCUUACGAGGAGACACCAGGAAGCCAGGAAG | 149 |
| R14058 | AUAGAUUGCUCCUUACGAGGAGACCUGGCUUCCUGGUGAAG | 150 |
| R14059 | AUAGAUUGCUCCUUACGAGGAGACCUGGUGAAGAUGAGUGG | 151 |
| R14060 | AUAGAUUGCUCCUUACGAGGAGACCCCCAUGUCGACUACAU | 152 |
| R14065 | AUAGAUUGCUCCUUACGAGGAGACAUCCGCCCGGUACCGUG | 153 |
| R14066 | AUAGAUUGCUCCUUACGAGGAGACCCGGUGGUCACUCUGUA | 154 |
| R14067 | AUAGAUUGCUCCUUACGAGGAGACCCCGGUGGUCACUCUGU | 155 |
| R14070 | AUAGAUUGCUCCUUACGAGGAGACGCCACGCCGGCAUCCCG | 156 |
| R14072 | AUAGAUUGCUCCUUACGAGGAGACGCAGUUGAGCACGCGCA | 157 |
| R14073 | AUAGAUUGCUCCUUACGAGGAGACCCUUGGCAGUUGAGCAC | 158 |
| R14074 | AUAGAUUGCUCCUUACGAGGAGACCCGAAUAAACUCCAGGC | 159 |
| R14075 | AUAGAUUGCUCCUUACGAGGAGACUCCGAAUAAACUCCAGG | 160 |
| R14076 | AUAGAUUGCUCCUUACGAGGAGACAUUCGGAAAAGCCAGCU | 161 |
| R14077 | AUAGAUUGCUCCUUACGAGGAGACUUCGGAAAAGCCAGCUG | 162 |
| R14078 | AUAGAUUGCUCCUUACGAGGAGACGGAAAAGCCAGCUGGUC | 163 |
| R14079 | AUAGAUUGCUCCUUACGAGGAGACUGCUGCUGCCCCUGGCG | 164 |
| R14081 | AUAGAUUGCUCCUUACGAGGAGACAACGCCGCCUGCCAGCG | 165 |
| R14082 | AUAGAUUGCUCCUUACGAGGAGACCCGGCAGCGGUGACCAG | 166 |
| R14083 | AUAGAUUGCUCCUUACGAGGAGACCGGGACGAUGCCUGCCU | 167 |
| R14084 | AUAGAUUGCUCCUUACGAGGAGACGUGGCCCCAACUGUGAU | 168 |
| R14086 | AUAGAUUGCUCCUUACGAGGAGACGUCCCCAAAGUCCCCAG | 169 |
| R14087 | AUAGAUUGCUCCUUACGAGGAGACGGGGACCAACUUUGGCC | 170 |
| R14088 | AUAGAUUGCUCCUUACGAGGAGACGGGACCAACUUUGGCCG | 171 |
| R14089 | AUAGAUUGCUCCUUACGAGGAGACGGCCGCUGUGUGGACCU | 172 |
| R14090 | AUAGAUUGCUCCUUACGAGGAGACGCCGCUGUGUGGACCUC | 173 |
| R14091 | AUAGAUUGCUCCUUACGAGGAGACGCCCCAGGGGAGGACAU | 174 |
| R14092 | AUAGAUUGCUCCUUACGAGGAGACCCCCAGGGGAGGACAUC | 175 |
| R14093 | AUAGAUUGCUCCUUACGAGGAGACGUGCCUCCAGCGACUGC | 176 |
| R14096 | AUAGAUUGCUCCUUACGAGGAGACCAGCCAUGAUGCUGUCU | 177 |
| R14097 | AUAGAUUGCUCCUUACGAGGAGACAGGCAGAGACUGAUCCA | 178 |
| R14098 | AUAGAUUGCUCCUUACGAGGAGACGCAGAGAAGUGGAUCAG | 179 |
| R14099 | AUAGAUUGCUCCUUACGAGGAGACGGCAGAGAAGUGGAUCA | 180 |
| R14100 | AUAGAUUGCUCCUUACGAGGAGACUCUGCCAAAGAUGUCAU | 181 |
| R14101 | AUAGAUUGCUCCUUACGAGGAGACAUGACAUCUUUGGCAGA | 182 |
| R14102 | AUAGAUUGCUCCUUACGAGGAGACCCUGAGGACCAGCGGGU | 183 |
| R14103 | AUAGAUUGCUCCUUACGAGGAGACGGGGUCAGUACCCGCUG | 184 |
| R14104 | AUAGAUUGCUCCUUACGAGGAGACGCAGCUGUUUUGCAGGA | 185 |
| R14108 | AUAGAUUGCUCCUUACGAGGAGACCCACUCCUGGAGAAACU | 186 |
| R14109 | AUAGAUUGCUCCUUACGAGGAGACCUCCAGGAGUGGGAAGC | 187 |
| R14110 | AUAGAUUGCUCCUUACGAGGAGACUCCAGGAGUGGGAAGCG | 188 |
| R14112 | AUAGAUUGCUCCUUACGAGGAGACUGGGGGUGAGGGUGUCU | 189 |
| R14113 | AUAGAUUGCUCCUUACGAGGAGACGGGGGUGAGGGUGUCUA | 190 |
| R14114 | AUAGAUUGCUCCUUACGAGGAGACGGGGUGAGGGUGUCUAC | 191 |
| R14115 | AUAGAUUGCUCCUUACGAGGAGACCCAGGUGCUGCCUGCUA | 192 |
| R14117 | AUAGAUUGCUCCUUACGAGGAGACUGGGUGCCAAGGUCCUC | 193 |
| R14118 | AUAGAUUGCUCCUUACGAGGAGACGCACCCACAAGCCGCCU | 194 |
| R14119 | AUAGAUUGCUCCUUACGAGGAGACGGCUGACCUCGUGGCCU | 195 |
| R14123 | AUAGAUUGCUCCUUACGAGGAGACCAUUCCAGACCUGGGGC | 196 |
| R14124 | AUAGAUUGCUCCUUACGAGGAGACGCAUUCCAGACCUGGGG | 197 |
| R14125 | AUAGAUUGCUCCUUACGAGGAGACACUUUGCAUUCCAGACC | 198 |
| R14126 | AUAGAUUGCUCCUUACGAGGAGACCAUGCUCCUUGACUUUG | 199 |
| R14127 | AUAGAUUGCUCCUUACGAGGAGACUCGUGGCCUGUGAGGAC | 200 |
| R14130 | AUAGAUUGCUCCUUACGAGGAGACUUCGCUGGUGCUGCCUG | 201 |
| R14131 | AUAGAUUGCUCCUUACGAGGAGACCCAUCUGCUGCCGGAGC | 202 |
| n/a | AUAGAUUGCUCCUUACGAGGAGACGAGCAACGGCGGAAGGU | 492 |
| n/a | mA*mU*mA*GAUUGCUCCUUACGAGGAGACGAGCAACGGCGG | 493 |
| | AAmG*mG*mU | |
| PL34711 | AUUGCUCCUUACGAGGAGACACCCACCUGUGCCGCGGCGA | 810 |
| PL34712 | AUUGCUCCUUACGAGGAGACCAUGGGGCCAGGAUCCGUGG | 811 |
| PL34713 | AUUGCUCCUUACGAGGAGACUGCAGGCCUUGAAGUUGCCC | 812 |
| PL34714 | AUUGCUCCUUACGAGGAGACGUCGAGCAGGCCAGCAAGUG | 813 |
| PL34715 | AUUGCUCCUUACGAGGAGACCUCCCAGGCCUGGAGUUUAU | 814 |
| PL34722 | AUUGCUCCUUACGAGGAGACGAAAGACGGAGGCAGCCUGG | 820 |

TABLE 10
Exemplary Guide Nucleic Acids Targeting ANGPTL3 for CasPhi.12
Effector Proteins

| Guide | | SEQ ID |
|---|---|---|
| ID | Guide sequence (shown as RNA), 5′- 3′ | NO: |
| PL34718 | AUUGCUCCUUACGAGGAGACUACUUACUUUAAGUGAAGUU | 817 |
| PL34719 | AUUGCUCCUUACGAGGAGACUAUCAGCUCAGAAGGACUAG | 818 |
| PL34720 | AUUGCUCCUUACGAGGAGACAUUCUAGGCAUUCCUGCUGA | 819 |

[0177] In some embodiments, the guide nucleic acids disclosed herein comprise a spacer sequence that is at least 70%, at least 75%, at least 80%, at least 85%, at least 90%, at least 95%, at least 96%, at least 97%, at least 98%, at least 99%, or 100% identical to any one of the sequences as set forth in TABLES 2, 4, and 6, a repeat sequence that is at least 70%, at least 75%, at least 80%, at least 85%, at least 90%, at least 95%, or 100% identical to SEQ ID NO: 488, and an intermediary sequence that is at least 70%, at least 75%, at least 80%, at least 85%, at least 90%, at least 95%, at least 96%, at least 97%, at least 98%, at least 99%, or 100% identical to SEQ ID NO: 489.

[0178] Exemplary guide nucleic acid sequences useful for systems, compositions and methods described herein are presented in TABLES 11-13. In some embodiments, the guide nucleic acid comprises a sequence that is at least 70%, at least 75%, at least 80%, at least 85%, at least 90%, at least 95%, or 100% identical to any one of the sequences of TABLES 11-13. In some embodiments, the guide nucleic acid consists of a sequence that is at least 70%, at least 75%, at least 80%, at least 85%, at least 90%, at least 95%, or 100% identical to any one of the sequences of TABLES 11-13. In some embodiments, the guide nucleic acids provided in TABLES 11-13 comprise an additional “G” at the 5′ end of the sequence. In some embodiments, the guide sequence comprises a spacer sequence selected from any one of SEQ ID NOs: 209-487, 822-825, 1000-1399, 1970-2026, and 2084-2086 with repeat sequence SEQ ID NOs: 488.

TABLE 11
Exemplary Guide Nucleic Acids Targeting APOC3 for CasM.265466
Effector Proteins

| | | SEQ ID |
|---|---|---|
| Guide ID | Guide sequence (shown as RNA), 5′-3′ | NO: |
| R17774 | ACAGCUUAUUUGGAAGCUGAAAUGUGAGGUUUAUAACA | 494 |
| | CUCACAAGAAUCCUGAAAAAGGAUGCCAAACCCUAGAG | |
| | GCAGCUGCUCCAG | |
| R17775 | ACAGCUUAUUUGGAAGCUGAAAUGUGAGGUUUAUAACA | 495 |
| | CUCACAAGAAUCCUGAAAAAGGAUGCCAAACCAUCCCU | |
| | AGAGGCAGCUGCU | |
| R17776 | ACAGCUUAUUUGGAAGCUGAAAUGUGAGGUUUAUAACA | 496 |
| | CUCACAAGAAUCCUGAAAAAGGAUGCCAAACAUCCCUA | |
| | GAGGCAGCUGCUC | |
| R17525 | ACAGCUUAUUUGGAAGCUGAAAUGUGAGGUUUAUAACA | 497 |
| | CUCACAAGAAUCCUGAAAAAGGAUGCCAAACCAGCCCC | |
| | GGGUACUCCUUGU | |
| R17526 | ACAGCUUAUUUGGAAGCUGAAAUGUGAGGUUUAUAACA | 498 |
| | CUCACAAGAAUCCUGAAAAAGGAUGCCAAACCUGGGCC | |
| | ACCUGGGACUCCU | |
| R17527 | ACAGCUUAUUUGGAAGCUGAAAUGUGAGGUUUAUAACA | 499 |
| | CUCACAAGAAUCCUGAAAAAGGAUGCCAAACCAUCCUU | |
| | GGCGGUCUUGGUG | |
| R17777 | ACAGCUUAUUUGGAAGCUGAAAUGUGAGGUUUAUAACA | 500 |
| | CUCACAAGAAUCCUGAAAAAGGAUGCCAAACCCAGGUG | |
| | GCCCAGCAGGCCA | |
| R17778 | ACAGCUUAUUUGGAAGCUGAAAUGUGAGGUUUAUAACA | 501 |
| | CUCACAAGAAUCCUGAAAAAGGAUGCCAAACCAGGAGU | |
| | CCCAGGUGGCCCA | |
| R17779 | ACAGCUUAUUUGGAAGCUGAAAUGUGAGGUUUAUAACA | 502 |
| | CUCACAAGAAUCCUGAAAAAGGAUGCCAAACAGUGCAU | |
| | CCUUGGCGGUCUU | |
| R17528 | ACAGCUUAUUUGGAAGCUGAAAUGUGAGGUUUAUAACA | 503 |
| | CUCACAAGAAUCCUGAAAAAGGAUGCCAAACGGUUGCU | |
| | UAAAAGGGACAGU | |
| R17539 | ACAGCUUAUUUGGAAGCUGAAAUGUGAGGUUUAUAACA | 504 |
| | CUCACAAGAAUCCUGAAAAAGGAUGCCAAACAGCAACC | |
| | UACAGGGGCAGCC | |
| R17529 | ACAGCUUAUUUGGAAGCUGAAAUGUGAGGUUUAUAACA | 505 |
| | CUCACAAGAAUCCUGAAAAAGGAUGCCAAACGGUGACC | |
| | GAUGGCUUCAGUU | |
| R17530 | ACAGCUUAUUUGGAAGCUGAAAUGUGAGGUUUAUAACA | 506 |
| | CUCACAAGAAUCCUGAAAAAGGAUGCCAAACCCCCUGU | |
| | AGGUUGCUUAAAA | |
| R17531 | ACAGCUUAUUUGGAAGCUGAAAUGUGAGGUUUAUAACA | 507 |
| | CUCACAAGAAUCCUGAAAAAGGAUGCCAAACGAGCACC | |
| | GUUAAGGACAAGU | |
| R17532 | ACAGCUUAUUUGGAAGCUGAAAUGUGAGGUUUAUAACA | 508 |
| | CUCACAAGAAUCCUGAAAAAGGAUGCCAAACGCUUCAG | |
| | UUCCCUGAAAGAC | |
| R17533 | ACAGCUUAUUUGGAAGCUGAAAUGUGAGGUUUAUAACA | 509 |
| | CUCACAAGAAUCCUGAAAAAGGAUGCCAAACAGACCUC | |
| | AAUACCCCAAGUC | |
| R17534 | ACAGCUUAUUUGGAAGCUGAAAUGUGAGGUUUAUAACA | 510 |
| | CUCACAAGAAUCCUGAAAAAGGAUGCCAAACCUUAAAA | |
| | GGGACAGUAUUCU | |
| R17535 | ACAGCUUAUUUGGAAGCUGAAAUGUGAGGUUUAUAACA | 511 |
| | CUCACAAGAAUCCUGAAAAAGGAUGCCAAACAAGCUGG | |
| | ACAAGAAGCUGCU | |
| R17536 | ACAGCUUAUUUGGAAGCUGAAAUGUGAGGUUUAUAACA | 512 |
| | CUCACAAGAAUCCUGAAAAAGGAUGCCAAACCCUGAGA | |
| | CCUCAAUACCCCA | |
| R17537 | ACAGCUUAUUUGGAAGCUGAAAUGUGAGGUUUAUAACA | 513 |
| | CUCACAAGAAUCCUGAAAAAGGAUGCCAAACACCGAUG | |
| | GCUUCAGUUCCCU | |
| R17538 | ACAGCUUAUUUGGAAGCUGAAAUGUGAGGUUUAUAACA | 514 |
| | CUCACAAGAAUCCUGAAAAAGGAUGCCAAACAAAGGGA | |
| | CAGUAUUCUCAGU | |
| R17540 | ACAGCUUAUUUGGAAGCUGAAAUGUGAGGUUUAUAACA | 515 |
| | CUCACAAGAAUCCUGAAAAAGGAUGCCAAACAAGCCAU | |
| | CGGUCACCCAGCC | |
| R17541 | ACAGCUUAUUUGGAAGCUGAAAUGUGAGGUUUAUAACA | 516 |
| | CUCACAAGAAUCCUGAAAAAGGAUGCCAAACUCCCUUU | |
| | UAAGCAACCUACA | |
| R17542 | ACAGCUUAUUUGGAAGCUGAAAUGUGAGGUUUAUAACA | 517 |
| | CUCACAAGAAUCCUGAAAAAGGAUGCCAAACUCCUUAA | |
| | CGGUGCUCCAGUA | |
| R17543 | ACAGCUUAUUUGGAAGCUGAAAUGUGAGGUUUAUAACA | 518 |
| | CUCACAAGAAUCCUGAAAAAGGAUGCCAAACAGAAUAC | |
| | UGUCCCUUUUAAG | |
| R17544 | ACAGCUUAUUUGGAAGCUGAAAUGUGAGGUUUAUAACA | 519 |
| | CUCACAAGAAUCCUGAAAAAGGAUGCCAAACCCUGGAG | |
| | GGGGGCCAGGCAU | |
| R17545 | ACAGCUUAUUUGGAAGCUGAAAUGUGAGGUUUAUAACA | 520 |
| | CUCACAAGAAUCCUGAAAAAGGAUGCCAAACACGGUGC | |
| | UCCAGUAGUCUUU | |
| R17546 | ACAGCUUAUUUGGAAGCUGAAAUGUGAGGUUUAUAACA | 521 |
| | CUCACAAGAAUCCUGAAAAAGGAUGCCAAACGCAGCUU | |
| | CUUGUCCAGCUUU | |
| R17547 | ACAGCUUAUUUGGAAGCUGAAAUGUGAGGUUUAUAACA | 522 |
| | CUCACAAGAAUCCUGAAAAAGGAUGCCAAACGUCUUUC | |
| | AGGGAACUGAAGC | |
| R17548 | ACAGCUUAUUUGGAAGCUGAAAUGUGAGGUUUAUAACA | 523 |
| | CUCACAAGAAUCCUGAAAAAGGAUGCCAAACGGGUAUU | |
| | GAGGUCUCAGGCA | |
| R17549 | ACAGCUUAUUUGGAAGCUGAAAUGUGAGGUUUAUAACA | 524 |
| | CUCACAAGAAUCCUGAAAAAGGAUGCCAAACCUCCAGU | |
| | AGUCUUUCAGGGA | |
| R17550 | ACAGCUUAUUUGGAAGCUGAAAUGUGAGGUUUAUAACA | 525 |
| | CUCACAAGAAUCCUGAAAAAGGAUGCCAAACGACUUGG | |
| | GGUAUUGAGGUCU | |
| R17551 | ACAGCUUAUUUGGAAGCUGAAAUGUGAGGUUUAUAACA | 526 |
| | CUCACAAGAAUCCUGAAAAAGGAUGCCAAACCUGUCCC | |
| | UUUUAAGCAACCU | |
| R17780 | ACAGCUUAUUUGGAAGCUGAAAUGUGAGGUUUAUAACA | 527 |
| | CUCACAAGAAUCCUGAAAAAGGAUGCCAAACCCCUGAA | |
| | AGACUACUGGAGC | |
| R17781 | ACAGCUUAUUUGGAAGCUGAAAUGUGAGGUUUAUAACA | 528 |
| | CUCACAAGAAUCCUGAAAAAGGAUGCCAAACUAGGUUG | |
| | CUUAAAAGGGACA | |
| R17782 | ACAGCUUAUUUGGAAGCUGAAAUGUGAGGUUUAUAACA | 529 |
| | CUCACAAGAAUCCUGAAAAAGGAUGCCAAACCCUGAAA | |
| | GACUACUGGAGCA | |
| R17783 | ACAGCUUAUUUGGAAGCUGAAAUGUGAGGUUUAUAACA | 530 |
| | CUCACAAGAAUCCUGAAAAAGGAUGCCAAACCUGGAGC | |
| | ACCGUUAAGGACA | |
| R17784 | ACAGCUUAUUUGGAAGCUGAAAUGUGAGGUUUAUAACA | 531 |
| | CUCACAAGAAUCCUGAAAAAGGAUGCCAAACAAAGACU | |
| | ACUGGAGCACCGU | |
| R17785 | ACAGCUUAUUUGGAAGCUGAAAUGUGAGGUUUAUAACA | 532 |
| | CUCACAAGAAUCCUGAAAAAGGAUGCCAAACGCUUAAA | |
| | AGGGACAGUAUUC | |
| R17786 | ACAGCUUAUUUGGAAGCUGAAAUGUGAGGUUUAUAACA | 533 |
| | CUCACAAGAAUCCUGAAAAAGGAUGCCAAACAGUUCCC | |
| | UGAAAGACUACUG | |
| R17787 | ACAGCUUAUUUGGAAGCUGAAAUGUGAGGUUUAUAACA | 534 |
| | CUCACAAGAAUCCUGAAAAAGGAUGCCAAACCAGUUCC | |
| | CUGAAAGACUACU | |
| R17788 | ACAGCUUAUUUGGAAGCUGAAAUGUGAGGUUUAUAACA | 535 |
| | CUCACAAGAAUCCUGAAAAAGGAUGCCAAACAAUACCC | |
| | CAAGUCCACCUGC | |
| R17789 | ACAGCUUAUUUGGAAGCUGAAAUGUGAGGUUUAUAACA | 536 |
| | CUCACAAGAAUCCUGAAAAAGGAUGCCAAACAUGCCUG | |
| | GCCCCCCUCCAGG | |
| R17790 | ACAGCUUAUUUGGAAGCUGAAAUGUGAGGUUUAUAACA | 537 |
| | CUCACAAGAAUCCUGAAAAAGGAUGCCAAACCAGGGCU | |
| | GCCCCUGUAGGUU | |
| R17791 | ACAGCUUAUUUGGAAGCUGAAAUGUGAGGUUUAUAACA | 538 |
| | CUCACAAGAAUCCUGAAAAAGGAUGCCAAACAAAAGGG | |
| | ACAGUAUUCUCAG | |
| R17792 | ACAGCUUAUUUGGAAGCUGAAAUGUGAGGUUUAUAACA | 539 |
| | CUCACAAGAAUCCUGAAAAAGGAUGCCAAACCCAAUAA | |
| | AGCUGGACAAGAA | |
| R17793 | ACAGCUUAUUUGGAAGCUGAAAUGUGAGGUUUAUAACA | 540 |
| | CUCACAAGAAUCCUGAAAAAGGAUGCCAAACAGGGAAC | |
| | UGAAGCCAUCGGU | |
| R17794 | ACAGCUUAUUUGGAAGCUGAAAUGUGAGGUUUAUAACA | 541 |
| | CUCACAAGAAUCCUGAAAAAGGAUGCCAAACUUAAGCA | |
| | ACCUACAGGGGCA | |
| R17795 | ACAGCUUAUUUGGAAGCUGAAAUGUGAGGUUUAUAACA | 542 |
| | CUCACAAGAAUCCUGAAAAAGGAUGCCAAACCUUGUCC | |
| | AGCUUUAUUGGGA | |
| R17796 | ACAGCUUAUUUGGAAGCUGAAAUGUGAGGUUUAUAACA | 543 |
| | CUCACAAGAAUCCUGAAAAAGGAUGCCAAACCCUUUUA | |
| | AGCAACCUACAGG | |
| R17797 | ACAGCUUAUUUGGAAGCUGAAAUGUGAGGUUUAUAACA | 544 |
| | CUCACAAGAAUCCUGAAAAAGGAUGCCAAACUUUCAGG | |
| | GAACUGAAGCCAU | |
| R17798 | ACAGCUUAUUUGGAAGCUGAAAUGUGAGGUUUAUAACA | 545 |
| | CUCACAAGAAUCCUGAAAAAGGAUGCCAAACCUUAACG | |
| | GUGCUCCAGUAGU | |
| R17799 | ACAGCUUAUUUGGAAGCUGAAAUGUGAGGUUUAUAACA | 546 |
| | CUCACAAGAAUCCUGAAAAAGGAUGCCAAACCAGUAGU | |
| | CUUUCAGGGAACU | |
| R17800 | ACAGCUUAUUUGGAAGCUGAAAUGUGAGGUUUAUAACA | 547 |
| | CUCACAAGAAUCCUGAAAAAGGAUGCCAAACUCAGGGA | |
| | ACUGAAGCCAUCG | |
| R17801 | ACAGCUUAUUUGGAAGCUGAAAUGUGAGGUUUAUAACA | 548 |
| | CUCACAAGAAUCCUGAAAAAGGAUGCCAAACAACGGUG | |
| | CUCCAGUAGUCUU | |
| R17802 | ACAGCUUAUUUGGAAGCUGAAAUGUGAGGUUUAUAACA | 549 |
| | CUCACAAGAAUCCUGAAAAAGGAUGCCAAACUAAGCAA | |
| | CCUACAGGGGCAG | |
| R17803 | ACAGCUUAUUUGGAAGCUGAAAUGUGAGGUUUAUAACA | 550 |
| | CUCACAAGAAUCCUGAAAAAGGAUGCCAAACUUGUCCA | |
| | GCUUUAUUGGGAG | |
| R17804 | ACAGCUUAUUUGGAAGCUGAAAUGUGAGGUUUAUAACA | 551 |
| | CUCACAAGAAUCCUGAAAAAGGAUGCCAAACGGGGUAU | |
| | UGAGGUCUCAGGC | |
| R17805 | ACAGCUUAUUUGGAAGCUGAAAUGUGAGGUUUAUAACA | 552 |
| | CUCACAAGAAUCCUGAAAAAGGAUGCCAAACCAGGGAA | |
| | CUGAAGCCAUCGG | |
| R17806 | ACAGCUUAUUUGGAAGCUGAAAUGUGAGGUUUAUAACA | 553 |
| | CUCACAAGAAUCCUGAAAAAGGAUGCCAAACGUCCUUA | |
| | ACGGUGCUCCAGU | |
| R17807 | ACAGCUUAUUUGGAAGCUGAAAUGUGAGGUUUAUAACA | 554 |
| | CUCACAAGAAUCCUGAAAAAGGAUGCCAAACAAGCAAC | |
| | CUACAGGGGCAGC | |
| R17552 | ACAGCUUAUUUGGAAGCUGAAAUGUGAGGUUUAUAACA | 555 |
| | CUCACAAGAAUCCUGAAAAAGGAUGCCAAACGAGCAGC | |
| | UGCCUCUAGGGAU | |
| R17553 | ACAGCUUAUUUGGAAGCUGAAAUGUGAGGUUUAUAACA | 556 |
| | CUCACAAGAAUCCUGAAAAAGGAUGCCAAACCCUGGAG | |
| | CAGCUGCCUCUAG | |
| R17808 | ACAGCUUAUUUGGAAGCUGAAAUGUGAGGUUUAUAACA | 557 |
| | CUCACAAGAAUCCUGAAAAAGGAUGCCAAACACCUGGA | |
| | GCAGCUGCCUCUA | |
| R17809 | ACAGCUUAUUUGGAAGCUGAAAUGUGAGGUUUAUAACA | 558 |
| | CUCACAAGAAUCCUGAAAAAGGAUGCCAAACCCCAGAG | |
| | GGCAUUACCUGGA | |
| R17810 | ACAGCUUAUUUGGAAGCUGAAAUGUGAGGUUUAUAACA | 559 |
| | CUCACAAGAAUCCUGAAAAAGGAUGCCAAACCCCUCCC | |
| | CAGAGGGCAUUAC | |
| R17811 | ACAGCUUAUUUGGAAGCUGAAAUGUGAGGUUUAUAACA | 560 |
| | CUCACAAGAAUCCUGAAAAAGGAUGCCAAACCCCCUCC | |
| | CCAGAGGGCAUUA | |
| R17812 | ACAGCUUAUUUGGAAGCUGAAAUGUGAGGUUUAUAACA | 561 |
| | CUCACAAGAAUCCUGAAAAAGGAUGCCAAACUCCCCUC | |
| | CCCAGAGGGCAUU | |
| R17813 | ACAGCUUAUUUGGAAGCUGAAAUGUGAGGUUUAUAACA | 562 |
| | CUCACAAGAAUCCUGAAAAAGGAUGCCAAACUUUCCCC | |
| | UCCCCAGAGGGCA | |
| R17814 | ACAGCUUAUUUGGAAGCUGAAAUGUGAGGUUUAUAACA | 563 |
| | CUCACAAGAAUCCUGAAAAAGGAUGCCAAACCUCUUUC | |
| | CCCUCCCCAGAGG | |
| R17815 | ACAGCUUAUUUGGAAGCUGAAAUGUGAGGUUUAUAACA | 564 |
| | CUCACAAGAAUCCUGAAAAAGGAUGCCAAACCCCUCCU | |
| | CUUUCCCCUCCCC | |
| R17816 | ACAGCUUAUUUGGAAGCUGAAAUGUGAGGUUUAUAACA | 565 |
| | CUCACAAGAAUCCUGAAAAAGGAUGCCAAACCUCCCCU | |
| | CCUCUUUCCCCUC | |
| R17554 | ACAGCUUAUUUGGAAGCUGAAAUGUGAGGUUUAUAACA | 566 |
| | CUCACAAGAAUCCUGAAAAAGGAUGCCAAACCUCUUUC | |
| | CUCAGGAGCUUCA | |
| R17555 | ACAGCUUAUUUGGAAGCUGAAAUGUGAGGUUUAUAACA | 567 |
| | CUCACAAGAAUCCUGAAAAAGGAUGCCAAACAAGCUCC | |
| | UGAGGAAAGAGCA | |
| R17817 | ACAGCUUAUUUGGAAGCUGAAAUGUGAGGUUUAUAACA | 568 |
| | CUCACAAGAAUCCUGAAAAAGGAUGCCAAACAGCCCUG | |
| | CUCUUUCCUCAGG | |
| R17818 | ACAGCUUAUUUGGAAGCUGAAAUGUGAGGUUUAUAACA | 569 |
| | CUCACAAGAAUCCUGAAAAAGGAUGCCAAACUUUCCUC | |
| | AGGAGCUUCAGAG | |
| R17819 | ACAGCUUAUUUGGAAGCUGAAAUGUGAGGUUUAUAACA | 570 |
| | CUCACAAGAAUCCUGAAAAAGGAUGCCAAACUCCUCAG | |
| | GAGCUUCAGAGGC | |
| R17820 | ACAGCUUAUUUGGAAGCUGAAAUGUGAGGUUUAUAACA | 571 |
| | CUCACAAGAAUCCUGAAAAAGGAUGCCAAACCCUCAGG | |
| | AGCUUCAGAGGCC | |
| R17821 | ACAGCUUAUUUGGAAGCUGAAAUGUGAGGUUUAUAACA | 572 |
| | CUCACAAGAAUCCUGAAAAAGGAUGCCAAACCUCAGGA | |
| | GCUUCAGAGGCCG | |
| R17822 | ACAGCUUAUUUGGAAGCUGAAAUGUGAGGUUUAUAACA | 573 |
| | CUCACAAGAAUCCUGAAAAAGGAUGCCAAACAGGAGCU | |
| | UCAGAGGCCGAGG | |
| R17823 | ACAGCUUAUUUGGAAGCUGAAAUGUGAGGUUUAUAACA | 574 |
| | CUCACAAGAAUCCUGAAAAAGGAUGCCAAACUGAAGCU | |
| | CCUGAGGAAAGAG | |
| R17824 | ACAGCUUAUUUGGAAGCUGAAAUGUGAGGUUUAUAACA | 575 |
| | CUCACAAGAAUCCUGAAAAAGGAUGCCAAACGGCCUCU | |
| | GAAGCUCCUGAGG | |
| R17556 | ACAGCUUAUUUGGAAGCUGAAAUGUGAGGUUUAUAACA | 577 |
| | CUCACAAGAAUCCUGAAAAAGGAUGCCAAACGCCUGCU | |
| | GGGCCACCUGGGA | |
| R17557 | ACAGCUUAUUUGGAAGCUGAAAUGUGAGGUUUAUAACA | 578 |
| | CUCACAAGAAUCCUGAAAAAGGAUGCCAAACCCUGGCC | |
| | UGCUGGGCCACCU | |
| R17558 | ACAGCUUAUUUGGAAGCUGAAAUGUGAGGUUUAUAACA | 579 |
| | CUCACAAGAAUCCUGAAAAAGGAUGCCAAACUACCUGG | |
| | CCUGCUGGGCCAC | |
| R17559 | ACAGCUUAUUUGGAAGCUGAAAUGUGAGGUUUAUAACA | 580 |
| | CUCACAAGAAUCCUGAAAAAGGAUGCCAAACGGGAGGG | |
| | AGGCCAGCGGGUG | |
| R17560 | ACAGCUUAUUUGGAAGCUGAAAUGUGAGGUUUAUAACA | 581 |
| | CUCACAAGAAUCCUGAAAAAGGAUGCCAAACCCCCCAG | |
| | CCCAGUCCCACCA | |
| R17825 | ACAGCUUAUUUGGAAGCUGAAAUGUGAGGUUUAUAACA | 582 |
| | CUCACAAGAAUCCUGAAAAAGGAUGCCAAACCCCUGCU | |
| | CUGUUGCUUCCCC | |
| R15784 | ACAGCUUAUUUGGAAGCUGAAAUGUGAGGUUUAUAACA | 583 |
| | CUCACAAGAAUCCUGAAAAAGGAUGCCAAACGCCUCAG | |
| | GGUUCAAAUCCCA | |
| R15788 | ACAGCUUAUUUGGAAGCUGAAAUGUGAGGUUUAUAACA | 584 |
| | CUCACAAGAAUCCUGAAAAAGGAUGCCAAACGCCCUGC | |
| | AUGAAGCCAAGAA | |
| R16927 | ACAGCUUAUUUGGAAGCUGAAAUGUGAGGUUUAUAACA | 826 |
| | CUCACAAGAAUCCUGAAAAAGGAUGCCAAACAGUUCUG | |
| | GGAUUUGGACCCU | |
| R16928 | ACAGCUUAUUUGGAAGCUGAAAUGUGAGGUUUAUAACA | 827 |
| | CUCACAAGAAUCCUGAAAAAGGAUGCCAAACGACCCUG | |
| | AGGUCAGACCAAC | |
| R16929 | ACAGCUUAUUUGGAAGCUGAAAUGUGAGGUUUAUAACA | 828 |
| | CUCACAAGAAUCCUGAAAAAGGAUGCCAAACACCUCAG | |
| | GGUCCAAAUCCCA | |
| n/a | ACAGCUUAUUUGGAAGCUGAAAUGUGAGGUUUAUAACA | 1570 |
| | CUCACAAGAAUCCUGAAAAAGGAUGCCAAACGACAGCC | |
| | CAGUCCUACCCCA | |
| n/a | ACAGCUUAUUUGGAAGCUGAAAUGUGAGGUUUAUAACA | 1571 |
| | CUCACAAGAAUCCUGAAAAAGGAUGCCAAACUUCAGGG | |
| | CUUGGGGCUGGUG | |
| n/a | ACAGCUUAUUUGGAAGCUGAAAUGUGAGGUUUAUAACA | 1572 |
| | CUCACAAGAAUCCUGAAAAAGGAUGCCAAACCCUUUAC | |
| | UCCAAACACCCCC | |
| n/a | ACAGCUUAUUUGGAAGCUGAAAUGUGAGGUUUAUAACA | 1573 |
| | CUCACAAGAAUCCUGAAAAAGGAUGCCAAACCCCCCCA | |
| | CCCCUCAUCAUAA | |
| n/a | ACAGCUUAUUUGGAAGCUGAAAUGUGAGGUUUAUAACA | 1574 |
| | CUCACAAGAAUCCUGAAAAAGGAUGCCAAACUUCAGUC | |
| | UGGUGGGUUUUCU | |
| n/a | ACAGCUUAUUUGGAAGCUGAAAUGUGAGGUUUAUAACA | 1575 |
| | CUCACAAGAAUCCUGAAAAAGGAUGCCAAACUCACUUG | |
| | CCCAAAGCUACAC | |
| n/a | ACAGCUUAUUUGGAAGCUGAAAUGUGAGGUUUAUAACA | 1576 |
| | CUCACAAGAAUCCUGAAAAAGGAUGCCAAACGUGGGUU | |
| | UUCUGCUCCAUCC | |
| n/a | ACAGCUUAUUUGGAAGCUGAAAUGUGAGGUUUAUAACA | 1577 |
| | CUCACAAGAAUCCUGAAAAAGGAUGCCAAACCCGGAGC | |
| | CACUGAUGCCUGG | |
| n/a | ACAGCUUAUUUGGAAGCUGAAAUGUGAGGUUUAUAACA | 1578 |
| | CUCACAAGAAUCCUGAAAAAGGAUGCCAAACGACUCAG | |
| | UCUCCUAGGGAUU | |
| n/a | ACAGCUUAUUUGGAAGCUGAAAUGUGAGGUUUAUAACA | 1579 |
| | CUCACAAGAAUCCUGAAAAAGGAUGCCAAACGCCUAUG | |
| | UCCAAGCCAUUUC | |
| n/a | ACAGCUUAUUUGGAAGCUGAAAUGUGAGGUUUAUAACA | 1580 |
| | CUCACAAGAAUCCUGAAAAAGGAUGCCAAACCCUCAGG | |
| | CCCUCAUCUCCAC | |
| n/a | ACAGCUUAUUUGGAAGCUGAAAUGUGAGGUUUAUAACA | 1581 |
| | CUCACAAGAAUCCUGAAAAAGGAUGCCAAACUCCAAGC | |
| | CAUUUCCCCUCUC | |
| n/a | ACAGCUUAUUUGGAAGCUGAAAUGUGAGGUUUAUAACA | 1582 |
| | CUCACAAGAAUCCUGAAAAAGGAUGCCAAACAAAGGCU | |
| | GAGAUGGGCCCGA | |
| n/a | ACAGCUUAUUUGGAAGCUGAAAUGUGAGGUUUAUAACA | 1583 |
| | CUCACAAGAAUCCUGAAAAAGGAUGCCAAACAAAUUCC | |
| | AGUGUGAAAGGCU | |
| n/a | ACAGCUUAUUUGGAAGCUGAAAUGUGAGGUUUAUAACA | 1584 |
| | CUCACAAGAAUCCUGAAAAAGGAUGCCAAACGAGAUGA | |
| | UAUAAAACAGGUC | |
| n/a | ACAGCUUAUUUGGAAGCUGAAAUGUGAGGUUUAUAACA | 1585 |
| | CUCACAAGAAUCCUGAAAAAGGAUGCCAAACGGGAGGG | |
| | GAAAGAGGAGGGG | |
| n/a | ACAGCUUAUUUGGAAGCUGAAAUGUGAGGUUUAUAACA | 1586 |
| | CUCACAAGAAUCCUGAAAAAGGAUGCCAAACAAGAACA | |
| | UGGAGGCCCGGGA | |
| n/a | ACAGCUUAUUUGGAAGCUGAAAUGUGAGGUUUAUAACA | 1587 |
| | CUCACAAGAAUCCUGAAAAAGGAUGCCAAACGGGCUGG | |
| | UGGAGGGAGGGGC | |
| n/a | ACAGCUUAUUUGGAAGCUGAAAUGUGAGGUUUAUAACA | 1588 |
| | CUCACAAGAAUCCUGAAAAAGGAUGCCAAACAUGCCUG | |
| | GUCUUCUGUGCCU | |
| n/a | ACAGCUUAUUUGGAAGCUGAAAUGUGAGGUUUAUAACA | 1589 |
| | CUCACAAGAAUCCUGAAAAAGGAUGCCAAACUGUUCAG | |
| | GGCUUGGGGCUGG | |
| n/a | ACAGCUUAUUUGGAAGCUGAAAUGUGAGGUUUAUAACA | 1590 |
| | CUCACAAGAAUCCUGAAAAAGGAUGCCAAACCUCCAGG | |
| | UAAUGCCCUCUGG | |
| n/a | ACAGCUUAUUUGGAAGCUGAAAUGUGAGGUUUAUAACA | 1591 |
| | CUCACAAGAAUCCUGAAAAAGGAUGCCAAACAGGGCUC | |
| | CCCAGGCCCACCC | |
| n/a | ACAGCUUAUUUGGAAGCUGAAAUGUGAGGUUUAUAACA | 1592 |
| | CUCACAAGAAUCCUGAAAAAGGAUGCCAAACUUGGCUG | |
| | GACUGGACGGAGA | |
| n/a | ACAGCUUAUUUGGAAGCUGAAAUGUGAGGUUUAUAACA | 1593 |
| | CUCACAAGAAUCCUGAAAAAGGAUGCCAAACGAGCUAA | |
| | GGAAGCCUCGGAG | |
| n/a | ACAGCUUAUUUGGAAGCUGAAAUGUGAGGUUUAUAACA | 1594 |
| | CUCACAAGAAUCCUGAAAAAGGAUGCCAAACCCCUCUG | |
| | GGGAGGGGAAAGA | |
| n/a | ACAGCUUAUUUGGAAGCUGAAAUGUGAGGUUUAUAACA | 1595 |
| | CUCACAAGAAUCCUGAAAAAGGAUGCCAAACCUCCAAA | |
| | CACCCCCCAGCCC | |
| n/a | ACAGCUUAUUUGGAAGCUGAAAUGUGAGGUUUAUAACA | 1596 |
| | CUCACAAGAAUCCUGAAAAAGGAUGCCAAACGGGAGCC | |
| | AGUCAGCUAGGAA | |
| n/a | ACAGCUUAUUUGGAAGCUGAAAUGUGAGGUUUAUAACA | 1597 |
| | CUCACAAGAAUCCUGAAAAAGGAUGCCAAACGGCCCGA | |
| | GGCCCCUGGCCUA | |
| n/a | ACAGCUUAUUUGGAAGCUGAAAUGUGAGGUUUAUAACA | 1598 |
| | CUCACAAGAAUCCUGAAAAAGGAUGCCAAACGAGGCAG | |
| | CUGCUCCAGGUAA | |
| n/a | ACAGCUUAUUUGGAAGCUGAAAUGUGAGGUUUAUAACA | 1599 |
| | CUCACAAGAAUCCUGAAAAAGGAUGCCAAACGAGGGAG | |
| | GGGCCUGAAAUUC | |
| n/a | ACAGCUUAUUUGGAAGCUGAAAUGUGAGGUUUAUAACA | 1600 |
| | CUCACAAGAAUCCUGAAAAAGGAUGCCAAACGAGAGGG | |
| | CCAGAAAUCACCC | |
| n/a | ACAGCUUAUUUGGAAGCUGAAAUGUGAGGUUUAUAACA | 1601 |
| | CUCACAAGAAUCCUGAAAAAGGAUGCCAAACAAGAAGC | |
| | CCCUCACCCCUCU | |
| n/a | ACAGCUUAUUUGGAAGCUGAAAUGUGAGGUUUAUAACA | 1602 |
| | CUCACAAGAAUCCUGAAAAAGGAUGCCAAACCCCCAGA | |
| | CAGGGAAACUGAG | |
| n/a | ACAGCUUAUUUGGAAGCUGAAAUGUGAGGUUUAUAACA | 1603 |
| | CUCACAAGAAUCCUGAAAAAGGAUGCCAAACGGGCUGG | |
| | AAGUGGCUCCAAG | |
| n/a | ACAGCUUAUUUGGAAGCUGAAAUGUGAGGUUUAUAACA | 1604 |
| | CUCACAAGAAUCCUGAAAAAGGAUGCCAAACCUCCAGG | |
| | CUGUGUUCAGGGC | |
| n/a | ACAGCUUAUUUGGAAGCUGAAAUGUGAGGUUUAUAACA | 1605 |
| | CUCACAAGAAUCCUGAAAAAGGAUGCCAAACGUCUUCU | |
| | GUGCCUUUACUCC | |
| n/a | ACAGCUUAUUUGGAAGCUGAAAUGUGAGGUUUAUAACA | 1606 |
| | CUCACAAGAAUCCUGAAAAAGGAUGCCAAACCACAGGG | |
| | GGUGGGGCUGGAA | |
| n/a | ACAGCUUAUUUGGAAGCUGAAAUGUGAGGUUUAUAACA | 1607 |
| | CUCACAAGAAUCCUGAAAAAGGAUGCCAAACGACUGGA | |
| | CGGAGAUCAGUCC | |
| n/a | ACAGCUUAUUUGGAAGCUGAAAUGUGAGGUUUAUAACA | 1608 |
| | CUCACAAGAAUCCUGAAAAAGGAUGCCAAACGACGGGU | |
| | GCCCCCCACCCCU | |
| n/a | ACAGCUUAUUUGGAAGCUGAAAUGUGAGGUUUAUAACA | 1609 |
| | CUCACAAGAAUCCUGAAAAAGGAUGCCAAACUGUCCAA | |
| | GCCAUUUCCCCUC | |
| n/a | ACAGCUUAUUUGGAAGCUGAAAUGUGAGGUUUAUAACA | 1610 |
| | CUCACAAGAAUCCUGAAAAAGGAUGCCAAACAGAUGGG | |
| | CCCGAGGCCCCUG | |
| n/a | ACAGCUUAUUUGGAAGCUGAAAUGUGAGGUUUAUAACA | 1611 |
| | CUCACAAGAAUCCUGAAAAAGGAUGCCAAACGGUCCUC | |
| | AGUGCCUGCUGCC | |
| n/a | ACAGCUUAUUUGGAAGCUGAAAUGUGAGGUUUAUAACA | 1612 |
| | CUCACAAGAAUCCUGAAAAAGGAUGCCAAACCAGGGCU | |
| | GGCGGGACAGCAG | |
| n/a | ACAGCUUAUUUGGAAGCUGAAAUGUGAGGUUUAUAACA | 1613 |
| | CUCACAAGAAUCCUGAAAAAGGAUGCCAAACCCUUGAU | |
| | GUUCAGUCUGGUG | |
| n/a | ACAGCUUAUUUGGAAGCUGAAAUGUGAGGUUUAUAACA | 1614 |
| | CUCACAAGAAUCCUGAAAAAGGAUGCCAAACAGGCCUG | |
| | GAGAGGGCCAGAA | |
| n/a | ACAGCUUAUUUGGAAGCUGAAAUGUGAGGUUUAUAACA | 1615 |
| | CUCACAAGAAUCCUGAAAAAGGAUGCCAAACCCCUGGA | |
| | GAUGAUAUAAAAC | |
| n/a | ACAGCUUAUUUGGAAGCUGAAAUGUGAGGUUUAUAACA | 1616 |
| | CUCACAAGAAUCCUGAAAAAGGAUGCCAAACACCUGAA | |
| | GAACAUGGAGGCC | |
| n/a | ACAGCUUAUUUGGAAGCUGAAAUGUGAGGUUUAUAACA | 1617 |
| | CUCACAAGAAUCCUGAAAAAGGAUGCCAAACCCUGGUC | |
| | UUCUGUGCCUUUA | |
| n/a | ACAGCUUAUUUGGAAGCUGAAAUGUGAGGUUUAUAACA | 1618 |
| | CUCACAAGAAUCCUGAAAAAGGAUGCCAAACACCUUUG | |
| | CCCAGCGCCCUGG | |
| n/a | ACAGCUUAUUUGGAAGCUGAAAUGUGAGGUUUAUAACA | 1619 |
| | CUCACAAGAAUCCUGAAAAAGGAUGCCAAACCCCAAAG | |
| | CUACACAGGGGGU | |
| n/a | ACAGCUUAUUUGGAAGCUGAAAUGUGAGGUUUAUAACA | 1620 |
| | CUCACAAGAAUCCUGAAAAAGGAUGCCAAACGUGGAGG | |
| | GAGGGGCCUGAAA | |
| n/a | ACAGCUUAUUUGGAAGCUGAAAUGUGAGGUUUAUAACA | 1621 |
| | CUCACAAGAAUCCUGAAAAAGGAUGCCAAACUGCCUUU | |
| | ACUCCAAACACCC | |
| n/a | ACAGCUUAUUUGGAAGCUGAAAUGUGAGGUUUAUAACA | 1622 |
| | CUCACAAGAAUCCUGAAAAAGGAUGCCAAACCUCCAUC | |
| | CCACCCACCUCCC | |
| n/a | ACAGCUUAUUUGGAAGCUGAAAUGUGAGGUUUAUAACA | 1623 |
| | CUCACAAGAAUCCUGAAAAAGGAUGCCAAACAUGUUCA | |
| | GUCUGGUGGGUUU | |
| n/a | ACAGCUUAUUUGGAAGCUGAAAUGUGAGGUUUAUAACA | 1624 |
| | CUCACAAGAAUCCUGAAAAAGGAUGCCAAACCUAGAGC | |
| | UAAGGAAGCCUCG | |
| n/a | ACAGCUUAUUUGGAAGCUGAAAUGUGAGGUUUAUAACA | 1625 |
| | CUCACAAGAAUCCUGAAAAAGGAUGCCAAACGGAAGGA | |
| | AUGAGGGCUCCCC | |
| n/a | ACAGCUUAUUUGGAAGCUGAAAUGUGAGGUUUAUAACA | 1626 |
| | CUCACAAGAAUCCUGAAAAAGGAUGCCAAACGGCUGCA | |
| | GGGCUGGCGGGAC | |
| n/a | ACAGCUUAUUUGGAAGCUGAAAUGUGAGGUUUAUAACA | 1627 |
| | CUCACAAGAAUCCUGAAAAAGGAUGCCAAACAUGCCCU | |
| | CUGGGGAGGGGAA | |
| n/a | ACAGCUUAUUUGGAAGCUGAAAUGUGAGGUUUAUAACA | 1628 |
| | CUCACAAGAAUCCUGAAAAAGGAUGCCAAACAAACAGG | |
| | UCAGAACCCUCCU | |
| n/a | ACAGCUUAUUUGGAAGCUGAAAUGUGAGGUUUAUAACA | 1629 |
| | CUCACAAGAAUCCUGAAAAAGGAUGCCAAACGGGCUGG | |
| | AGGAAGCCUUAGA | |
| n/a | ACAGCUUAUUUGGAAGCUGAAAUGUGAGGUUUAUAACA | 1630 |
| | CUCACAAGAAUCCUGAAAAAGGAUGCCAAACUUCUCAA | |
| | GUCUGAAGAAGCC | |
| n/a | ACAGCUUAUUUGGAAGCUGAAAUGUGAGGUUUAUAACA | 1631 |
| | CUCACAAGAAUCCUGAAAAAGGAUGCCAAACAGCUCAU | |
| | CUGGGCUGCAGGG | |
| n/a | ACAGCUUAUUUGGAAGCUGAAAUGUGAGGUUUAUAACA | 1632 |
| | CUCACAAGAAUCCUGAAAAAGGAUGCCAAACGGGAUUU | |
| | CCCAACUCUCCCG | |
| n/a | ACAGCUUAUUUGGAAGCUGAAAUGUGAGGUUUAUAACA | 1633 |
| | CUCACAAGAAUCCUGAAAAAGGAUGCCAAACGACGGAG | |
| | AUCAGUCCAGACC | |
| n/a | ACAGCUUAUUUGGAAGCUGAAAUGUGAGGUUUAUAACA | 1634 |
| | CUCACAAGAAUCCUGAAAAAGGAUGCCAAACUGAAAGG | |
| | CUGAGAUGGGCCC | |
| n/a | ACAGCUUAUUUGGAAGCUGAAAUGUGAGGUUUAUAACA | 1635 |
| | CUCACAAGAAUCCUGAAAAAGGAUGCCAAACCCUGUCU | |
| | GCUCAGUUCAUCC | |
| n/a | ACAGCUUAUUUGGAAGCUGAAAUGUGAGGUUUAUAACA | 1636 |
| | CUCACAAGAAUCCUGAAAAAGGAUGCCAAACCAGGUUC | |
| | CCCCCUCAUUCUU | |
| n/a | ACAGCUUAUUUGGAAGCUGAAAUGUGAGGUUUAUAACA | 1637 |
| | CUCACAAGAAUCCUGAAAAAGGAUGCCAAACGUCAGCA | |
| | GGUGACCUUUGCC | |
| n/a | ACAGCUUAUUUGGAAGCUGAAAUGUGAGGUUUAUAACA | 1638 |
| | CUCACAAGAAUCCUGAAAAAGGAUGCCAAACGAGGAAG | |
| | CCUUAGACAGCCC | |
| n/a | ACAGCUUAUUUGGAAGCUGAAAUGUGAGGUUUAUAACA | 1639 |
| | CUCACAAGAAUCCUGAAAAAGGAUGCCAAACCUGCAUC | |
| | UGGACACCCUGCC | |
| n/a | ACAGCUUAUUUGGAAGCUGAAAUGUGAGGUUUAUAACA | 1640 |
| | CUCACAAGAAUCCUGAAAAAGGAUGCCAAACCCCAGCG | |
| | CCCUGGGUCCUCA | |
| n/a | ACAGCUUAUUUGGAAGCUGAAAUGUGAGGUUUAUAACA | 1641 |
| | CUCACAAGAAUCCUGAAAAAGGAUGCCAAACCCCAGCC | |
| | CAGCCAGCAAGCC | |
| n/a | ACAGCUUAUUUGGAAGCUGAAAUGUGAGGUUUAUAACA | 1642 |
| | CUCACAAGAAUCCUGAAAAAGGAUGCCAAACGGUUUUC | |
| | UGCUCCAUCCCAC | |
| n/a | ACAGCUUAUUUGGAAGCUGAAAUGUGAGGUUUAUAACA | 1643 |
| | CUCACAAGAAUCCUGAAAAAGGAUGCCAAACUAAAACA | |
| | GGUCAGAACCCUC | |
| n/a | ACAGCUUAUUUGGAAGCUGAAAUGUGAGGUUUAUAACA | 1644 |
| | CUCACAAGAAUCCUGAAAAAGGAUGCCAAACCUCAGUU | |
| | CAUCCCUAGAGGC | |
| n/a | ACAGCUUAUUUGGAAGCUGAAAUGUGAGGUUUAUAACA | 1645 |
| | CUCACAAGAAUCCUGAAAAAGGAUGCCAAACGACACCC | |
| | UGCCUCAGGCCCU | |
| n/a | ACAGCUUAUUUGGAAGCUGAAAUGUGAGGUUUAUAACA | 1646 |
| | CUCACAAGAAUCCUGAAAAAGGAUGCCAAACGCGGGAC | |
| | AGCAGCGUGGACU | |
| n/a | ACAGCUUAUUUGGAAGCUGAAAUGUGAGGUUUAUAACA | 1647 |
| | CUCACAAGAAUCCUGAAAAAGGAUGCCAAACAAGAGGG | |
| | GCAAGAGGAGCUC | |
| n/a | ACAGCUUAUUUGGAAGCUGAAAUGUGAGGUUUAUAACA | 1648 |
| | CUCACAAGAAUCCUGAAAAAGGAUGCCAAACCAUCUGG | |
| | ACACCCUGCCUCA | |
| n/a | ACAGCUUAUUUGGAAGCUGAAAUGUGAGGUUUAUAACA | 1649 |
| | CUCACAAGAAUCCUGAAAAAGGAUGCCAAACGAGGCCC | |
| | GGGAGGGGUGUCA | |
| n/a | ACAGCUUAUUUGGAAGCUGAAAUGUGAGGUUUAUAACA | 1650 |
| | CUCACAAGAAUCCUGAAAAAGGAUGCCAAACCCUGCUG | |
| | CCCUGGAGAUGAU | |
| n/a | ACAGCUUAUUUGGAAGCUGAAAUGUGAGGUUUAUAACA | 1651 |
| | CUCACAAGAAUCCUGAAAAAGGAUGCCAAACAGGAAGC | |
| | CUCGGAGCUGGAC | |
| n/a | ACAGCUUAUUUGGAAGCUGAAAUGUGAGGUUUAUAACA | 1652 |
| | CUCACAAGAAUCCUGAAAAAGGAUGCCAAACUCUGCUC | |
| | AGUUCAUCCCUAG | |
| n/a | ACAGCUUAUUUGGAAGCUGAAAUGUGAGGUUUAUAACA | 1653 |
| | CUCACAAGAAUCCUGAAAAAGGAUGCCAAACGAAGUGG | |
| | CUCCAAGUGCAGG | |
| n/a | ACAGCUUAUUUGGAAGCUGAAAUGUGAGGUUUAUAACA | 1654 |
| | CUCACAAGAAUCCUGAAAAAGGAUGCCAAACGCUGGAC | |
| | UGGACGGAGAUCA | |
| n/a | ACAGCUUAUUUGGAAGCUGAAAUGUGAGGUUUAUAACA | 1655 |
| | CUCACAAGAAUCCUGAAAAAGGAUGCCAAACGAGAAGC | |
| | ACUUGCUAGAGCU | |
| n/a | ACAGCUUAUUUGGAAGCUGAAAUGUGAGGUUUAUAACA | 1656 |
| | CUCACAAGAAUCCUGAAAAAGGAUGCCAAACCUGCCCU | |
| | GGAGAUGAUAUAA | |
| n/a | ACAGCUUAUUUGGAAGCUGAAAUGUGAGGUUUAUAACA | 1657 |
| | CUCACAAGAAUCCUGAAAAAGGAUGCCAAACAUAUAAA | |
| | ACAGGUCAGAACC | |
| n/a | ACAGCUUAUUUGGAAGCUGAAAUGUGAGGUUUAUAACA | 1658 |
| | CUCACAAGAAUCCUGAAAAAGGAUGCCAAACGCUCCAA | |
| | GUGCAGGUUCCCC | |
| n/a | ACAGCUUAUUUGGAAGCUGAAAUGUGAGGUUUAUAACA | 1659 |
| | CUCACAAGAAUCCUGAAAAAGGAUGCCAAACGGCUGGG | |
| | CAGGGAGCUCCUC | |
| n/a | ACAGCUUAUUUGGAAGCUGAAAUGUGAGGUUUAUAACA | 1660 |
| | CUCACAAGAAUCCUGAAAAAGGAUGCCAAACGACAUAG | |
| | GCCAGGGGCCUCG | |
| n/a | ACAGCUUAUUUGGAAGCUGAAAUGUGAGGUUUAUAACA | 1661 |
| | CUCACAAGAAUCCUGAAAAAGGAUGCCAAACGGCCUGG | |
| | GGAGCCCUCAUUC | |
| n/a | ACAGCUUAUUUGGAAGCUGAAAUGUGAGGUUUAUAACA | 1662 |
| | CUCACAAGAAUCCUGAAAAAGGAUGCCAAACGGCUGGG | |
| | GGGUGUUUGGAGU | |
| n/a | ACAGCUUAUUUGGAAGCUGAAAUGUGAGGUUUAUAACA | 1663 |
| | CUCACAAGAAUCCUGAAAAAGGAUGCCAAACGGUGGGA | |
| | UGGAGCAGAAAAC | |
| n/a | ACAGCUUAUUUGGAAGCUGAAAUGUGAGGUUUAUAACA | 1664 |
| | CUCACAAGAAUCCUGAAAAAGGAUGCCAAACGCUUGGA | |
| | CAUAGGCCAGGGG | |
| n/a | ACAGCUUAUUUGGAAGCUGAAAUGUGAGGUUUAUAACA | 1665 |
| | CUCACAAGAAUCCUGAAAAAGGAUGCCAAACAGGGCCU | |
| | GAGGCAGGGUGUC | |
| n/a | ACAGCUUAUUUGGAAGCUGAAAUGUGAGGUUUAUAACA | 1666 |
| | CUCACAAGAAUCCUGAAAAAGGAUGCCAAACAGGCAGG | |
| | GUGUCCAGAUGCA | |
| n/a | ACAGCUUAUUUGGAAGCUGAAAUGUGAGGUUUAUAACA | 1667 |
| | CUCACAAGAAUCCUGAAAAAGGAUGCCAAACUCCCGCC | |
| | AGCCCUGCAGCCC | |
| n/a | ACAGCUUAUUUGGAAGCUGAAAUGUGAGGUUUAUAACA | 1668 |
| | CUCACAAGAAUCCUGAAAAAGGAUGCCAAACCCCCUCU | |
| | UCAUCCUCCUCCC | |
| n/a | ACAGCUUAUUUGGAAGCUGAAAUGUGAGGUUUAUAACA | 1669 |
| | CUCACAAGAAUCCUGAAAAAGGAUGCCAAACAACAUCA | |
| | AGGCACCUGCGGU | |
| n/a | ACAGCUUAUUUGGAAGCUGAAAUGUGAGGUUUAUAACA | 1670 |
| | CUCACAAGAAUCCUGAAAAAGGAUGCCAAACAGCUCAG | |
| | GAACUGGGGGUGG | |
| n/a | ACAGCUUAUUUGGAAGCUGAAAUGUGAGGUUUAUAACA | 1671 |
| | CUCACAAGAAUCCUGAAAAAGGAUGCCAAACUUCUUCA | |
| | GGUUAUGAUGAGG | |
| n/a | ACAGCUUAUUUGGAAGCUGAAAUGUGAGGUUUAUAACA | 1672 |
| | CUCACAAGAAUCCUGAAAAAGGAUGCCAAACGCUUUGG | |
| | GCAAGUGACACCC | |
| n/a | ACAGCUUAUUUGGAAGCUGAAAUGUGAGGUUUAUAACA | 1673 |
| | CUCACAAGAAUCCUGAAAAAGGAUGCCAAACAGGGGGG | |
| | AACCUGCACUUGG | |
| n/a | ACAGCUUAUUUGGAAGCUGAAAUGUGAGGUUUAUAACA | 1674 |
| | CUCACAAGAAUCCUGAAAAAGGAUGCCAAACGCUUGGG | |
| | CUGGGGGGUGUUU | |
| n/a | ACAGCUUAUUUGGAAGCUGAAAUGUGAGGUUUAUAACA | 1675 |
| | CUCACAAGAAUCCUGAAAAAGGAUGCCAAACAACUGAG | |
| | CAGACAGGCAGGA | |
| n/a | ACAGCUUAUUUGGAAGCUGAAAUGUGAGGUUUAUAACA | 1676 |
| | CUCACAAGAAUCCUGAAAAAGGAUGCCAAACUGUGUCU | |
| | UUGGGUGAUUUCU | |
| n/a | ACAGCUUAUUUGGAAGCUGAAAUGUGAGGUUUAUAACA | 1677 |
| | CUCACAAGAAUCCUGAAAAAGGAUGCCAAACUGAUGAG | |
| | GGGUGGGGGGCAC | |
| n/a | ACAGCUUAUUUGGAAGCUGAAAUGUGAGGUUUAUAACA | 1678 |
| | CUCACAAGAAUCCUGAAAAAGGAUGCCAAACGGCAGGG | |
| | AGCUCCUCUUGCC | |
| n/a | ACAGCUUAUUUGGAAGCUGAAAUGUGAGGUUUAUAACA | 1679 |
| | CUCACAAGAAUCCUGAAAAAGGAUGCCAAACAGGGGUG | |
| | GGGGGCACCCGUC | |
| n/a | ACAGCUUAUUUGGAAGCUGAAAUGUGAGGUUUAUAACA | 1680 |
| | CUCACAAGAAUCCUGAAAAAGGAUGCCAAACCCUGGAG | |
| | CAGCUGCCUCUAG | |
| n/a | ACAGCUUAUUUGGAAGCUGAAAUGUGAGGUUUAUAACA | 1681 |
| | CUCACAAGAAUCCUGAAAAAGGAUGCCAAACGGGAUGA | |
| | ACUGAGCAGACAG | |
| n/a | ACAGCUUAUUUGGAAGCUGAAAUGUGAGGUUUAUAACA | 1682 |
| | CUCACAAGAAUCCUGAAAAAGGAUGCCAAACAGGCUUC | |
| | CUCCAGCCCUAAG | |
| n/a | ACAGCUUAUUUGGAAGCUGAAAUGUGAGGUUUAUAACA | 1683 |
| | CUCACAAGAAUCCUGAAAAAGGAUGCCAAACGAGAUGA | |
| | GGGCCUGAGGCAG | |
| n/a | ACAGCUUAUUUGGAAGCUGAAAUGUGAGGUUUAUAACA | 1684 |
| | CUCACAAGAAUCCUGAAAAAGGAUGCCAAACGGAUGGA | |
| | GCAGAAAACCCAC | |
| n/a | ACAGCUUAUUUGGAAGCUGAAAUGUGAGGUUUAUAACA | 1685 |
| | CUCACAAGAAUCCUGAAAAAGGAUGCCAAACAAGAAUG | |
| | AGGGGGGAACCUG | |
| n/a | ACAGCUUAUUUGGAAGCUGAAAUGUGAGGUUUAUAACA | 1686 |
| | CUCACAAGAAUCCUGAAAAAGGAUGCCAAACUUUGGAG | |
| | UAAAGGCACAGAA | |
| n/a | ACAGCUUAUUUGGAAGCUGAAAUGUGAGGUUUAUAACA | 1687 |
| | CUCACAAGAAUCCUGAAAAAGGAUGCCAAACGAGUAGA | |
| | GGGGUGAGGGGCU | |
| n/a | ACAGCUUAUUUGGAAGCUGAAAUGUGAGGUUUAUAACA | 1688 |
| | CUCACAAGAAUCCUGAAAAAGGAUGCCAAACACCUGUU | |
| | UUAUAUCAUCUCC | |
| n/a | ACAGCUUAUUUGGAAGCUGAAAUGUGAGGUUUAUAACA | 1689 |
| | CUCACAAGAAUCCUGAAAAAGGAUGCCAAACGUGAGAG | |
| | GGGAAAUGGCUUG | |
| n/a | ACAGCUUAUUUGGAAGCUGAAAUGUGAGGUUUAUAACA | 1690 |
| | CUCACAAGAAUCCUGAAAAAGGAUGCCAAACUGUAGCU | |
| | UUGGGCAAGUGAC | |
| n/a | ACAGCUUAUUUGGAAGCUGAAAUGUGAGGUUUAUAACA | 1691 |
| | CUCACAAGAAUCCUGAAAAAGGAUGCCAAACUGUCUUU | |
| | GGGUGAUUUCUGG | |
| n/a | ACAGCUUAUUUGGAAGCUGAAAUGUGAGGUUUAUAACA | 1692 |
| | CUCACAAGAAUCCUGAAAAAGGAUGCCAAACUAUCAUC | |
| | UCCAGGGCAGCAG | |
| n/a | ACAGCUUAUUUGGAAGCUGAAAUGUGAGGUUUAUAACA | 1693 |
| | CUCACAAGAAUCCUGAAAAAGGAUGCCAAACGAGCAGA | |
| | AAACCCACCAGAC | |
| n/a | ACAGCUUAUUUGGAAGCUGAAAUGUGAGGUUUAUAACA | 1694 |
| | CUCACAAGAAUCCUGAAAAAGGAUGCCAAACGGAGACU | |
| | GAGUCCACGCUGC | |
| n/a | ACAGCUUAUUUGGAAGCUGAAAUGUGAGGUUUAUAACA | 1695 |
| | CUCACAAGAAUCCUGAAAAAGGAUGCCAAACCAGCCCA | |
| | GAUGAGCUCAGGA | |
| n/a | ACAGCUUAUUUGGAAGCUGAAAUGUGAGGUUUAUAACA | 1696 |
| | CUCACAAGAAUCCUGAAAAAGGAUGCCAAACGGUGGCU | |
| | UGGGCUGGGGGGU | |
| n/a | ACAGCUUAUUUGGAAGCUGAAAUGUGAGGUUUAUAACA | 1697 |
| | CUCACAAGAAUCCUGAAAAAGGAUGCCAAACAGGGGCU | |
| | UCUUCAGACUUGA | |
| n/a | ACAGCUUAUUUGGAAGCUGAAAUGUGAGGUUUAUAACA | 1698 |
| | CUCACAAGAAUCCUGAAAAAGGAUGCCAAACCACUUGG | |
| | AGCCACUUCCAGC | |
| n/a | ACAGCUUAUUUGGAAGCUGAAAUGUGAGGUUUAUAACA | 1699 |
| | CUCACAAGAAUCCUGAAAAAGGAUGCCAAACCAGCAAG | |
| | CGGGCGGGAGAGU | |
| n/a | ACAGCUUAUUUGGAAGCUGAAAUGUGAGGUUUAUAACA | 1700 |
| | CUCACAAGAAUCCUGAAAAAGGAUGCCAAACGGCAAAG | |
| | GUCACCUGCUGAC | |
| n/a | ACAGCUUAUUUGGAAGCUGAAAUGUGAGGUUUAUAACA | 1701 |
| | CUCACAAGAAUCCUGAAAAAGGAUGCCAAACUCUUUGG | |
| | GUGAUUUCUGGCC | |
| n/a | ACAGCUUAUUUGGAAGCUGAAAUGUGAGGUUUAUAACA | 1702 |
| | CUCACAAGAAUCCUGAAAAAGGAUGCCAAACUCAUCUC | |
| | CAGGGCAGCAGGC | |
| n/a | ACAGCUUAUUUGGAAGCUGAAAUGUGAGGUUUAUAACA | 1703 |
| | CUCACAAGAAUCCUGAAAAAGGAUGCCAAACAGCAGAC | |
| | AGGCAGGAGGGUU | |
| n/a | ACAGCUUAUUUGGAAGCUGAAAUGUGAGGUUUAUAACA | 1704 |
| | CUCACAAGAAUCCUGAAAAAGGAUGCCAAACAGGACCC | |
| | AGGGCGCUGGGCA | |
| n/a | ACAGCUUAUUUGGAAGCUGAAAUGUGAGGUUUAUAACA | 1705 |
| | CUCACAAGAAUCCUGAAAAAGGAUGCCAAACGGGGGUG | |
| | UUUGGAGUAAAGG | |
| n/a | ACAGCUUAUUUGGAAGCUGAAAUGUGAGGUUUAUAACA | 1706 |
| | CUCACAAGAAUCCUGAAAAAGGAUGCCAAACGGGUAGG | |
| | ACUGGGCUGUCUA | |
| n/a | ACAGCUUAUUUGGAAGCUGAAAUGUGAGGUUUAUAACA | 1707 |
| | CUCACAAGAAUCCUGAAAAAGGAUGCCAAACGGUGAUU | |
| | UCUGGCCCUCUCC | |
| n/a | ACAGCUUAUUUGGAAGCUGAAAUGUGAGGUUUAUAACA | 1708 |
| | CUCACAAGAAUCCUGAAAAAGGAUGCCAAACGAGCAGC | |
| | UGCCUCUAGGGAU | |
| n/a | ACAGCUUAUUUGGAAGCUGAAAUGUGAGGUUUAUAACA | 1709 |
| | CUCACAAGAAUCCUGAAAAAGGAUGCCAAACCUGUGUG | |
| | UCUUUGGGUGAUU | |
| n/a | ACAGCUUAUUUGGAAGCUGAAAUGUGAGGUUUAUAACA | 1710 |
| | CUCACAAGAAUCCUGAAAAAGGAUGCCAAACCUGACCA | |
| | GUGGAGAUGAGGG | |
| n/a | ACAGCUUAUUUGGAAGCUGAAAUGUGAGGUUUAUAACA | 1711 |
| | CUCACAAGAAUCCUGAAAAAGGAUGCCAAACAUGAGGG | |
| | GUGGGGGGCACCC | |
| n/a | ACAGCUUAUUUGGAAGCUGAAAUGUGAGGUUUAUAACA | 1712 |
| | CUCACAAGAAUCCUGAAAAAGGAUGCCAAACUCUAAGG | |
| | CUUCCUCCAGCCC | |
| n/a | ACAGCUUAUUUGGAAGCUGAAAUGUGAGGUUUAUAACA | 1713 |
| | CUCACAAGAAUCCUGAAAAAGGAUGCCAAACGAAUUUC | |
| | AGGCCCCUCCCUC | |
| n/a | ACAGCUUAUUUGGAAGCUGAAAUGUGAGGUUUAUAACA | 1714 |
| | CUCACAAGAAUCCUGAAAAAGGAUGCCAAACAGCCUGA | |
| | AGAAUGAGGGGGG | |
| n/a | ACAGCUUAUUUGGAAGCUGAAAUGUGAGGUUUAUAACA | 1715 |
| | CUCACAAGAAUCCUGAAAAAGGAUGCCAAACGGGGGCA | |
| | CCCGUCCAGCUCC | |
| n/a | ACAGCUUAUUUGGAAGCUGAAAUGUGAGGUUUAUAACA | 1716 |
| | CUCACAAGAAUCCUGAAAAAGGAUGCCAAACAAGGCAC | |
| | AGAAGACCAGGCA | |
| n/a | ACAGCUUAUUUGGAAGCUGAAAUGUGAGGUUUAUAACA | 1717 |
| | CUCACAAGAAUCCUGAAAAAGGAUGCCAAACACCAGUG | |
| | GAGAUGAGGGCCU | |
| n/a | ACAGCUUAUUUGGAAGCUGAAAUGUGAGGUUUAUAACA | 1718 |
| | CUCACAAGAAUCCUGAAAAAGGAUGCCAAACGGCUGUC | |
| | UAAGGCUUCCUCC | |
| n/a | ACAGCUUAUUUGGAAGCUGAAAUGUGAGGUUUAUAACA | 1719 |
| | CUCACAAGAAUCCUGAAAAAGGAUGCCAAACGGGGUGG | |
| | GCCUGGGGAGCCC | |
| n/a | ACAGCUUAUUUGGAAGCUGAAAUGUGAGGUUUAUAACA | 1720 |
| | CUCACAAGAAUCCUGAAAAAGGAUGCCAAACUAGCUUU | |
| | GGGCAAGUGACAC | |
| n/a | ACAGCUUAUUUGGAAGCUGAAAUGUGAGGUUUAUAACA | 1721 |
| | CUCACAAGAAUCCUGAAAAAGGAUGCCAAACGAGCCAC | |
| | UUCCAGCCCCACC | |
| n/a | ACAGCUUAUUUGGAAGCUGAAAUGUGAGGUUUAUAACA | 1722 |
| | CUCACAAGAAUCCUGAAAAAGGAUGCCAAACAUUUCUG | |
| | GCCCUCUCCAGGC | |
| n/a | ACAGCUUAUUUGGAAGCUGAAAUGUGAGGUUUAUAACA | 1723 |
| | CUCACAAGAAUCCUGAAAAAGGAUGCCAAACACUGGCU | |
| | CCCCAGGGAGAGG | |
| n/a | ACAGCUUAUUUGGAAGCUGAAAUGUGAGGUUUAUAACA | 1724 |
| | CUCACAAGAAUCCUGAAAAAGGAUGCCAAACGCCCUCU | |
| | CCAGGCCUCAGUU | |
| n/a | ACAGCUUAUUUGGAAGCUGAAAUGUGAGGUUUAUAACA | 1725 |
| | CUCACAAGAAUCCUGAAAAAGGAUGCCAAACGGACUGG | |
| | GCUGUCUAAGGCU | |
| n/a | ACAGCUUAUUUGGAAGCUGAAAUGUGAGGUUUAUAACA | 1726 |
| | CUCACAAGAAUCCUGAAAAAGGAUGCCAAACCUGUCCC | |
| | GCCAGCCCUGCAG | |
| n/a | ACAGCUUAUUUGGAAGCUGAAAUGUGAGGUUUAUAACA | 1727 |
| | CUCACAAGAAUCCUGAAAAAGGAUGCCAAACGGCAAGU | |
| | GACACCCCUCCCG | |
| n/a | ACAGCUUAUUUGGAAGCUGAAAUGUGAGGUUUAUAACA | 1728 |
| | CUCACAAGAAUCCUGAAAAAGGAUGCCAAACAGAACAA | |
| | GUGGGUGGCUUGG | |
| n/a | ACAGCUUAUUUGGAAGCUGAAAUGUGAGGUUUAUAACA | 1729 |
| | CUCACAAGAAUCCUGAAAAAGGAUGCCAAACAACACAG | |
| | CCUGGAGUAGAGG | |
| n/a | ACAGCUUAUUUGGAAGCUGAAAUGUGAGGUUUAUAACA | 1730 |
| | CUCACAAGAAUCCUGAAAAAGGAUGCCAAACUCUGGGG | |
| | UAGGACUGGGCUG | |
| n/a | ACAGCUUAUUUGGAAGCUGAAAUGUGAGGUUUAUAACA | 1731 |
| | CUCACAAGAAUCCUGAAAAAGGAUGCCAAACGAGGGGU | |
| | GAGGGGCUUCUUC | |
| n/a | ACAGCUUAUUUGGAAGCUGAAAUGUGAGGUUUAUAACA | 1732 |
| | CUCACAAGAAUCCUGAAAAAGGAUGCCAAACCGGUCUG | |
| | GACUGAUCUCCGU | |
| n/a | ACAGCUUAUUUGGAAGCUGAAAUGUGAGGUUUAUAACA | 1733 |
| | CUCACAAGAAUCCUGAAAAAGGAUGCCAAACGCUGGGC | |
| | UGGGCAGGGAGCU | |
| n/a | ACAGCUUAUUUGGAAGCUGAAAUGUGAGGUUUAUAACA | 1734 |
| | CUCACAAGAAUCCUGAAAAAGGAUGCCAAACGGGAGCC | |
| | CUCAUUCCUUCCU | |
| n/a | ACAGCUUAUUUGGAAGCUGAAAUGUGAGGUUUAUAACA | 1735 |
| | CUCACAAGAAUCCUGAAAAAGGAUGCCAAACGAGUAAA | |
| | GGCACAGAAGACC | |
| n/a | ACAGCUUAUUUGGAAGCUGAAAUGUGAGGUUUAUAACA | 1736 |
| | CUCACAAGAAUCCUGAAAAAGGAUGCCAAACGCAAGUG | |
| | CUUCUCCAGGCUU | |
| n/a | ACAGCUUAUUUGGAAGCUGAAAUGUGAGGUUUAUAACA | 1737 |
| | CUCACAAGAAUCCUGAAAAAGGAUGCCAAACAGAGGGG | |
| | AAAUGGCUUGGAC | |
| n/a | ACAGCUUAUUUGGAAGCUGAAAUGUGAGGUUUAUAACA | 1738 |
| | CUCACAAGAAUCCUGAAAAAGGAUGCCAAACAGUCCAC | |
| | GCUGCUGUCCCGC | |
| n/a | ACAGCUUAUUUGGAAGCUGAAAUGUGAGGUUUAUAACA | 1739 |
| | CUCACAAGAAUCCUGAAAAAGGAUGCCAAACCCUCUAG | |
| | GGAUGAACUGAGC | |
| n/a | ACAGCUUAUUUGGAAGCUGAAAUGUGAGGUUUAUAACA | 1740 |
| | CUCACAAGAAUCCUGAAAAAGGAUGCCAAACGGCCAGG | |
| | GGCCUCGGGCCCA | |
| n/a | ACAGCUUAUUUGGAAGCUGAAAUGUGAGGUUUAUAACA | 1741 |
| | CUCACAAGAAUCCUGAAAAAGGAUGCCAAACCUGGCUG | |
| | GGCUGGGCAGGGA | |
| n/a | ACAGCUUAUUUGGAAGCUGAAAUGUGAGGUUUAUAACA | 1742 |
| | CUCACAAGAAUCCUGAAAAAGGAUGCCAAACAUCUCCG | |
| | UCCAGUCCAGCCA | |
| n/a | ACAGCUUAUUUGGAAGCUGAAAUGUGAGGUUUAUAACA | 1743 |
| | CUCACAAGAAUCCUGAAAAAGGAUGCCAAACGACUGAU | |
| | CUCCGUCCAGUCC | |
| n/a | ACAGCUUAUUUGGAAGCUGAAAUGUGAGGUUUAUAACA | 1744 |
| | CUCACAAGAAUCCUGAAAAAGGAUGCCAAACGGAAAUC | |
| | CCUAGGAGACUGA | |
| n/a | ACAGCUUAUUUGGAAGCUGAAAUGUGAGGUUUAUAACA | 1745 |
| | CUCACAAGAAUCCUGAAAAAGGAUGCCAAACGCUGACU | |
| | GGCUCCCCAGGGA | |
| n/a | ACAGCUUAUUUGGAAGCUGAAAUGUGAGGUUUAUAACA | 1746 |
| | CUCACAAGAAUCCUGAAAAAGGAUGCCAAACACACCCC | |
| | UCCCGGGCCUCCA | |
| n/a | ACAGCUUAUUUGGAAGCUGAAAUGUGAGGUUUAUAACA | 1747 |
| | CUCACAAGAAUCCUGAAAAAGGAUGCCAAACGCUCUAG | |
| | CAAGUGCUUCUCC | |
| n/a | ACAGCUUAUUUGGAAGCUGAAAUGUGAGGUUUAUAACA | 1748 |
| | CUCACAAGAAUCCUGAAAAAGGAUGCCAAACCUUCUCC | |
| | AGGCUUGCUGGCU | |
| n/a | ACAGCUUAUUUGGAAGCUGAAAUGUGAGGUUUAUAACA | 1749 |
| | CUCACAAGAAUCCUGAAAAAGGAUGCCAAACUUUUAUA | |
| | UCAUCUCCAGGGC | |
| n/a | ACAGCUUAUUUGGAAGCUGAAAUGUGAGGUUUAUAACA | 1750 |
| | CUCACAAGAAUCCUGAAAAAGGAUGCCAAACUCCAGAU | |
| | GCAGCAAGCGGGC | |
| n/a | ACAGCUUAUUUGGAAGCUGAAAUGUGAGGUUUAUAACA | 1751 |
| | CUCACAAGAAUCCUGAAAAAGGAUGCCAAACGCUCCCC | |
| | AGGGAGAGGCUGG | |
| n/a | ACAGCUUAUUUGGAAGCUGAAAUGUGAGGUUUAUAACA | 1752 |
| | CUCACAAGAAUCCUGAAAAAGGAUGCCAAACACAGGCU | |
| | CCUUCACAGAAGC | |
| n/a | ACAGCUUAUUUGGAAGCUGAAAUGUGAGGUUUAUAACA | 1753 |
| | CUCACAAGAAUCCUGAAAAAGGAUGCCAAACCUCUGCA | |
| | GAACGGGACAUCU | |
| n/a | ACAGCUUAUUUGGAAGCUGAAAUGUGAGGUUUAUAACA | 1754 |
| | CUCACAAGAAUCCUGAAAAAGGAUGCCAAACGCCCCCC | |
| | CCACACCAGGAAC | |
| n/a | ACAGCUUAUUUGGAAGCUGAAAUGUGAGGUUUAUAACA | 1755 |
| | CUCACAAGAAUCCUGAAAAAGGAUGCCAAACAUAUGCU | |
| | GAGAAACAAUAGG | |
| n/a | ACAGCUUAUUUGGAAGCUGAAAUGUGAGGUUUAUAACA | 1756 |
| | CUCACAAGAAUCCUGAAAAAGGAUGCCAAACGGCAGGG | |
| | AUUAGUGAGAGAA | |
| n/a | ACAGCUUAUUUGGAAGCUGAAAUGUGAGGUUUAUAACA | 1757 |
| | CUCACAAGAAUCCUGAAAAAGGAUGCCAAACGACCUCA | |
| | GGCCUGCUUUACA | |
| n/a | ACAGCUUAUUUGGAAGCUGAAAUGUGAGGUUUAUAACA | 1758 |
| | CUCACAAGAAUCCUGAAAAAGGAUGCCAAACCAGAACG | |
| | GGACAUCUACUCU | |
| n/a | ACAGCUUAUUUGGAAGCUGAAAUGUGAGGUUUAUAACA | 1759 |
| | CUCACAAGAAUCCUGAAAAAGGAUGCCAAACGAGUAGC | |
| | UAGCUGCUUCUAG | |
| n/a | ACAGCUUAUUUGGAAGCUGAAAUGUGAGGUUUAUAACA | 1760 |
| | CUCACAAGAAUCCUGAAAAAGGAUGCCAAACGUGCCAC | |
| | UGUGGAGCAACGG | |
| n/a | ACAGCUUAUUUGGAAGCUGAAAUGUGAGGUUUAUAACA | 1761 |
| | CUCACAAGAAUCCUGAAAAAGGAUGCCAAACGGGAAUC | |
| | UGUGGUGCCACUG | |
| n/a | ACAGCUUAUUUGGAAGCUGAAAUGUGAGGUUUAUAACA | 1762 |
| | CUCACAAGAAUCCUGAAAAAGGAUGCCAAACGUGAGAG | |
| | CUUCUCCCUCCAG | |
| n/a | ACAGCUUAUUUGGAAGCUGAAAUGUGAGGUUUAUAACA | 1763 |
| | CUCACAAGAAUCCUGAAAAAGGAUGCCAAACGCUCCAG | |
| | GAUGGGACAGCGG | |
| n/a | ACAGCUUAUUUGGAAGCUGAAAUGUGAGGUUUAUAACA | 1764 |
| | CUCACAAGAAUCCUGAAAAAGGAUGCCAAACCUGAGAA | |
| | ACAAUAGGUUUCU | |
| n/a | ACAGCUUAUUUGGAAGCUGAAAUGUGAGGUUUAUAACA | 1765 |
| | CUCACAAGAAUCCUGAAAAAGGAUGCCAAACACCUGUU | |
| | UUAUAUUGGCUCC | |
| n/a | ACAGCUUAUUUGGAAGCUGAAAUGUGAGGUUUAUAACA | 1766 |
| | CUCACAAGAAUCCUGAAAAAGGAUGCCAAACAGAUUGC | |
| | CCAUGCUUUUCAC | |
| n/a | ACAGCUUAUUUGGAAGCUGAAAUGUGAGGUUUAUAACA | 1767 |
| | CUCACAAGAAUCCUGAAAAAGGAUGCCAAACGGGUGGA | |
| | AGGUGGAGUAUAG | |
| n/a | ACAGCUUAUUUGGAAGCUGAAAUGUGAGGUUUAUAACA | 1768 |
| | CUCACAAGAAUCCUGAAAAAGGAUGCCAAACCCAAAGG | |
| | CUUCUAAUAGCUC | |
| n/a | ACAGCUUAUUUGGAAGCUGAAAUGUGAGGUUUAUAACA | 1769 |
| | CUCACAAGAAUCCUGAAAAAGGAUGCCAAACAGACAGG | |
| | AAAAGACAGGGGA | |
| n/a | ACAGCUUAUUUGGAAGCUGAAAUGUGAGGUUUAUAACA | 1770 |
| | CUCACAAGAAUCCUGAAAAAGGAUGCCAAACGACCCAG | |
| | CCCCCCAAGUGGG | |
| n/a | ACAGCUUAUUUGGAAGCUGAAAUGUGAGGUUUAUAACA | 1771 |
| | CUCACAAGAAUCCUGAAAAAGGAUGCCAAACCCGUAGC | |
| | UGGGCAGGGAUUA | |
| n/a | ACAGCUUAUUUGGAAGCUGAAAUGUGAGGUUUAUAACA | 1772 |
| | CUCACAAGAAUCCUGAAAAAGGAUGCCAAACCAGUAGA | |
| | CCCAGCCCCCCAA | |
| n/a | ACAGCUUAUUUGGAAGCUGAAAUGUGAGGUUUAUAACA | 1773 |
| | CUCACAAGAAUCCUGAAAAAGGAUGCCAAACGGUGGUG | |
| | AGAGCUUCUCCCU | |
| n/a | ACAGCUUAUUUGGAAGCUGAAAUGUGAGGUUUAUAACA | 1774 |
| | CUCACAAGAAUCCUGAAAAAGGAUGCCAAACGAAUGGA | |
| | AUGGGGAAUCUGU | |
| n/a | ACAGCUUAUUUGGAAGCUGAAAUGUGAGGUUUAUAACA | 1775 |
| | CUCACAAGAAUCCUGAAAAAGGAUGCCAAACGAUGGCU | |
| | GGGUGGUGAGAGC | |
| n/a | ACAGCUUAUUUGGAAGCUGAAAUGUGAGGUUUAUAACA | 1776 |
| | CUCACAAGAAUCCUGAAAAAGGAUGCCAAACUGGAGCA | |
| | ACGGAGGAAGUGG | |
| n/a | ACAGCUUAUUUGGAAGCUGAAAUGUGAGGUUUAUAACA | 1777 |
| | CUCACAAGAAUCCUGAAAAAGGAUGCCAAACGCCUCCC | |
| | UUUCCCCAGCUUC | |
| n/a | ACAGCUUAUUUGGAAGCUGAAAUGUGAGGUUUAUAACA | 1778 |
| | CUCACAAGAAUCCUGAAAAAGGAUGCCAAACGGUCAUG | |
| | AAUCCCAAGCCUU | |
| n/a | ACAGCUUAUUUGGAAGCUGAAAUGUGAGGUUUAUAACA | 1779 |
| | CUCACAAGAAUCCUGAAAAAGGAUGCCAAACGCUAGCU | |
| | GCUUCUAGGGAUA | |
| n/a | ACAGCUUAUUUGGAAGCUGAAAUGUGAGGUUUAUAACA | 1780 |
| | CUCACAAGAAUCCUGAAAAAGGAUGCCAAACGCCCAUA | |
| | GCCUCCCUUUCCC | |
| n/a | ACAGCUUAUUUGGAAGCUGAAAUGUGAGGUUUAUAACA | 1781 |
| | CUCACAAGAAUCCUGAAAAAGGAUGCCAAACGAGACCA | |
| | UGAGUCCCAAGCC | |
| n/a | ACAGCUUAUUUGGAAGCUGAAAUGUGAGGUUUAUAACA | 1782 |
| | CUCACAAGAAUCCUGAAAAAGGAUGCCAAACUGACCUG | |
| | UUUUAUAUUGGCU | |
| n/a | ACAGCUUAUUUGGAAGCUGAAAUGUGAGGUUUAUAACA | 1783 |
| | CUCACAAGAAUCCUGAAAAAGGAUGCCAAACCUCUAAU | |
| | AUGCUGAGAAACA | |
| n/a | ACAGCUUAUUUGGAAGCUGAAAUGUGAGGUUUAUAACA | 1784 |
| | CUCACAAGAAUCCUGAAAAAGGAUGCCAAACCCACUGU | |
| | GGAGCAACGGAGG | |
| n/a | ACAGCUUAUUUGGAAGCUGAAAUGUGAGGUUUAUAACA | 1785 |
| | CUCACAAGAAUCCUGAAAAAGGAUGCCAAACACCUCCA | |
| | CCUGUGAUCCCAA | |
| n/a | ACAGCUUAUUUGGAAGCUGAAAUGUGAGGUUUAUAACA | 1786 |
| | CUCACAAGAAUCCUGAAAAAGGAUGCCAAACCUUUACA | |
| | GCCUAGAGCCAGU | |
| n/a | ACAGCUUAUUUGGAAGCUGAAAUGUGAGGUUUAUAACA | 1787 |
| | CUCACAAGAAUCCUGAAAAAGGAUGCCAAACCUGAGCA | |
| | GUCCAGACCAGAG | |
| n/a | ACAGCUUAUUUGGAAGCUGAAAUGUGAGGUUUAUAACA | 1788 |
| | CUCACAAGAAUCCUGAAAAAGGAUGCCAAACAGGCAGG | |
| | AAGGCCAUGCAGC | |
| n/a | ACAGCUUAUUUGGAAGCUGAAAUGUGAGGUUUAUAACA | 1789 |
| | CUCACAAGAAUCCUGAAAAAGGAUGCCAAACUUGGCUC | |
| | CAGGAUGGGACAG | |
| n/a | ACAGCUUAUUUGGAAGCUGAAAUGUGAGGUUUAUAACA | 1790 |
| | CUCACAAGAAUCCUGAAAAAGGAUGCCAAACAAAGCCU | |
| | UCCAGUAGAAUGG | |
| n/a | ACAGCUUAUUUGGAAGCUGAAAUGUGAGGUUUAUAACA | 1791 |
| | CUCACAAGAAUCCUGAAAAAGGAUGCCAAACAUAUUAG | |
| | AUAGAGAACUACA | |
| n/a | ACAGCUUAUUUGGAAGCUGAAAUGUGAGGUUUAUAACA | 1792 |
| | CUCACAAGAAUCCUGAAAAAGGAUGCCAAACCCCAGUG | |
| | CAAGGCUUUUGGC | |
| n/a | ACAGCUUAUUUGGAAGCUGAAAUGUGAGGUUUAUAACA | 1793 |
| | CUCACAAGAAUCCUGAAAAAGGAUGCCAAACUAGAAAU | |
| | ACUCUGCAGAACG | |
| n/a | ACAGCUUAUUUGGAAGCUGAAAUGUGAGGUUUAUAACA | 1794 |
| | CUCACAAGAAUCCUGAAAAAGGAUGCCAAACAAUCCCA | |
| | AGCCUUUCUCCCA | |
| n/a | ACAGCUUAUUUGGAAGCUGAAAUGUGAGGUUUAUAACA | 1795 |
| | CUCACAAGAAUCCUGAAAAAGGAUGCCAAACGAUACCA | |
| | AAGGCUUCUAAUA | |
| n/a | ACAGCUUAUUUGGAAGCUGAAAUGUGAGGUUUAUAACA | 1796 |
| | CUCACAAGAAUCCUGAAAAAGGAUGCCAAACAAACUGA | |
| | GCAGGCAAGCGGG | |
| n/a | ACAGCUUAUUUGGAAGCUGAAAUGUGAGGUUUAUAACA | 1797 |
| | CUCACAAGAAUCCUGAAAAAGGAUGCCAAACCUUUUCA | |
| | CGGCCACCUCCGC | |
| n/a | ACAGCUUAUUUGGAAGCUGAAAUGUGAGGUUUAUAACA | 1798 |
| | CUCACAAGAAUCCUGAAAAAGGAUGCCAAACAGAAAUC | |
| | CCUCUGAGAUUGC | |
| n/a | ACAGCUUAUUUGGAAGCUGAAAUGUGAGGUUUAUAACA | 1799 |
| | CUCACAAGAAUCCUGAAAAAGGAUGCCAAACGAGUAUA | |
| | GAAAUACUCUGCA | |
| n/a | ACAGCUUAUUUGGAAGCUGAAAUGUGAGGUUUAUAACA | 1800 |
| | CUCACAAGAAUCCUGAAAAAGGAUGCCAAACAAGGUUA | |
| | CAUGCCCCCACAC | |
| n/a | ACAGCUUAUUUGGAAGCUGAAAUGUGAGGUUUAUAACA | 1801 |
| | CUCACAAGAAUCCUGAAAAAGGAUGCCAAACUUUCUUC | |
| | CCUUCCUUCCUCU | |
| n/a | ACAGCUUAUUUGGAAGCUGAAAUGUGAGGUUUAUAACA | 1802 |
| | CUCACAAGAAUCCUGAAAAAGGAUGCCAAACUUUUAUA | |
| | UUGGCUCCAGGAU | |
| n/a | ACAGCUUAUUUGGAAGCUGAAAUGUGAGGUUUAUAACA | 1803 |
| | CUCACAAGAAUCCUGAAAAAGGAUGCCAAACGAGCCAG | |
| | UGACAGGCUCCUU | |
| n/a | ACAGCUUAUUUGGAAGCUGAAAUGUGAGGUUUAUAACA | 1804 |
| | CUCACAAGAAUCCUGAAAAAGGAUGCCAAACGAAGGUG | |
| | GAGUAUAGAAAUA | |
| n/a | ACAGCUUAUUUGGAAGCUGAAAUGUGAGGUUUAUAACA | 1805 |
| | CUCACAAGAAUCCUGAAAAAGGAUGCCAAACCCACUAC | |
| | CCAGUGCAAGGCU | |
| n/a | ACAGCUUAUUUGGAAGCUGAAAUGUGAGGUUUAUAACA | 1806 |
| | CUCACAAGAAUCCUGAAAAAGGAUGCCAAACGGUUUCU | |
| | UUUCCUCGCUAGG | |
| n/a | ACAGCUUAUUUGGAAGCUGAAAUGUGAGGUUUAUAACA | 1807 |
| | CUCACAAGAAUCCUGAAAAAGGAUGCCAAACAGGUCGG | |
| | UGAGACAGGAAAA | |
| n/a | ACAGCUUAUUUGGAAGCUGAAAUGUGAGGUUUAUAACA | 1808 |
| | CUCACAAGAAUCCUGAAAAAGGAUGCCAAACGAGAACU | |
| | ACAGUAGACCCAG | |
| n/a | ACAGCUUAUUUGGAAGCUGAAAUGUGAGGUUUAUAACA | 1809 |
| | CUCACAAGAAUCCUGAAAAAGGAUGCCAAACAGCUGGG | |
| | CAAAGGUCACCUG | |
| n/a | ACAGCUUAUUUGGAAGCUGAAAUGUGAGGUUUAUAACA | 1810 |
| | CUCACAAGAAUCCUGAAAAAGGAUGCCAAACUUAGAUA | |
| | GAGAACUACAGUA | |
| n/a | ACAGCUUAUUUGGAAGCUGAAAUGUGAGGUUUAUAACA | 1811 |
| | CUCACAAGAAUCCUGAAAAAGGAUGCCAAACCAGGCAG | |
| | CUCUGCCACUACC | |
| n/a | ACAGCUUAUUUGGAAGCUGAAAUGUGAGGUUUAUAACA | 1812 |
| | CUCACAAGAAUCCUGAAAAAGGAUGCCAAACCAAGGCU | |
| | UUUGGCCCAUAGC | |
| n/a | ACAGCUUAUUUGGAAGCUGAAAUGUGAGGUUUAUAACA | 1813 |
| | CUCACAAGAAUCCUGAAAAAGGAUGCCAAACAGAGCUU | |
| | CUCCCUCCAGCUC | |
| n/a | ACAGCUUAUUUGGAAGCUGAAAUGUGAGGUUUAUAACA | 1814 |
| | CUCACAAGAAUCCUGAAAAAGGAUGCCAAACGGUAGGC | |
| | AUGGAUACCAAAG | |
| n/a | ACAGCUUAUUUGGAAGCUGAAAUGUGAGGUUUAUAACA | 1815 |
| | CUCACAAGAAUCCUGAAAAAGGAUGCCAAACAGAAACA | |
| | AUAGGUUUCUUUU | |
| n/a | ACAGCUUAUUUGGAAGCUGAAAUGUGAGGUUUAUAACA | 1816 |
| | CUCACAAGAAUCCUGAAAAAGGAUGCCAAACGGGUGGG | |
| | AGGGGGCAGAGUG | |
| n/a | ACAGCUUAUUUGGAAGCUGAAAUGUGAGGUUUAUAACA | 1817 |
| | CUCACAAGAAUCCUGAAAAAGGAUGCCAAACUGCUGAG | |
| | AAACAAUAGGUUU | |
| n/a | ACAGCUUAUUUGGAAGCUGAAAUGUGAGGUUUAUAACA | 1818 |
| | CUCACAAGAAUCCUGAAAAAGGAUGCCAAACGCUGGGC | |
| | AGGGAUUAGUGAG | |
| n/a | ACAGCUUAUUUGGAAGCUGAAAUGUGAGGUUUAUAACA | 1819 |
| | CUCACAAGAAUCCUGAAAAAGGAUGCCAAACAACAAGG | |
| | GACAGCAUGACCC | |
| n/a | ACAGCUUAUUUGGAAGCUGAAAUGUGAGGUUUAUAACA | 1820 |
| | CUCACAAGAAUCCUGAAAAAGGAUGCCAAACGAGCAAC | |
| | GGAGGAAGUGGGG | |
| n/a | ACAGCUUAUUUGGAAGCUGAAAUGUGAGGUUUAUAACA | 1821 |
| | CUCACAAGAAUCCUGAAAAAGGAUGCCAAACCCGGCUC | |
| | ACCUAGAUGAGGU | |
| n/a | ACAGCUUAUUUGGAAGCUGAAAUGUGAGGUUUAUAACA | 1822 |
| | CUCACAAGAAUCCUGAAAAAGGAUGCCAAACGGACUCA | |
| | GUUUUUUCAGUCC | |
| n/a | ACAGCUUAUUUGGAAGCUGAAAUGUGAGGUUUAUAACA | 1823 |
| | CUCACAAGAAUCCUGAAAAAGGAUGCCAAACGAAAUAC | |
| | UCUGCAGAACGGG | |
| n/a | ACAGCUUAUUUGGAAGCUGAAAUGUGAGGUUUAUAACA | 1824 |
| | CUCACAAGAAUCCUGAAAAAGGAUGCCAAACGGCUAGA | |
| | UGGCUGGGUGGUG | |
| n/a | ACAGCUUAUUUGGAAGCUGAAAUGUGAGGUUUAUAACA | 1825 |
| | CUCACAAGAAUCCUGAAAAAGGAUGCCAAACGGAGGGG | |
| | GCAGAGUGAAGGU | |
| n/a | ACAGCUUAUUUGGAAGCUGAAAUGUGAGGUUUAUAACA | 1826 |
| | CUCACAAGAAUCCUGAAAAAGGAUGCCAAACGCUGCUU | |
| | CUAGGGAUAAAAC | |
| n/a | ACAGCUUAUUUGGAAGCUGAAAUGUGAGGUUUAUAACA | 1827 |
| | CUCACAAGAAUCCUGAAAAAGGAUGCCAAACCCUGGAG | |
| | UAGCUAGCUGCUU | |
| n/a | ACAGCUUAUUUGGAAGCUGAAAUGUGAGGUUUAUAACA | 1828 |
| | CUCACAAGAAUCCUGAAAAAGGAUGCCAAACCCAGAGG | |
| | AGUUGAGAAAUCC | |
| n/a | ACAGCUUAUUUGGAAGCUGAAAUGUGAGGUUUAUAACA | 1829 |
| | CUCACAAGAAUCCUGAAAAAGGAUGCCAAACCAGCCAU | |
| | CUGCCAGAGGAGU | |
| n/a | ACAGCUUAUUUGGAAGCUGAAAUGUGAGGUUUAUAACA | 1830 |
| | CUCACAAGAAUCCUGAAAAAGGAUGCCAAACCCCCCAC | |
| | ACUGACCUCCACC | |
| n/a | ACAGCUUAUUUGGAAGCUGAAAUGUGAGGUUUAUAACA | 1831 |
| | CUCACAAGAAUCCUGAAAAAGGAUGCCAAACGAUAGAG | |
| | AACUACAGUAGAC | |
| n/a | ACAGCUUAUUUGGAAGCUGAAAUGUGAGGUUUAUAACA | 1832 |
| | CUCACAAGAAUCCUGAAAAAGGAUGCCAAACCAUGCCC | |
| | CCACACUGACCUC | |
| n/a | ACAGCUUAUUUGGAAGCUGAAAUGUGAGGUUUAUAACA | 1833 |
| | CUCACAAGAAUCCUGAAAAAGGAUGCCAAACUGAUCCC | |
| | AACAGUCUCCUCU | |
| n/a | ACAGCUUAUUUGGAAGCUGAAAUGUGAGGUUUAUAACA | 1834 |
| | CUCACAAGAAUCCUGAAAAAGGAUGCCAAACAUCCCAA | |
| | CAGUCUCCUCUGC | |
| n/a | ACAGCUUAUUUGGAAGCUGAAAUGUGAGGUUUAUAACA | 1835 |
| | CUCACAAGAAUCCUGAAAAAGGAUGCCAAACGAAUGGG | |
| | GAAUCUGUGGUGC | |
| n/a | ACAGCUUAUUUGGAAGCUGAAAUGUGAGGUUUAUAACA | 1836 |
| | CUCACAAGAAUCCUGAAAAAGGAUGCCAAACGCUGGGU | |
| | GGUGAGAGCUUCU | |
| n/a | ACAGCUUAUUUGGAAGCUGAAAUGUGAGGUUUAUAACA | 1837 |
| | CUCACAAGAAUCCUGAAAAAGGAUGCCAAACACCCAAU | |
| | UGCAGGCAGCUCU | |
| n/a | ACAGCUUAUUUGGAAGCUGAAAUGUGAGGUUUAUAACA | 1838 |
| | CUCACAAGAAUCCUGAAAAAGGAUGCCAAACGGACAGC | |
| | GGGCACAGAAGGC | |
| n/a | ACAGCUUAUUUGGAAGCUGAAAUGUGAGGUUUAUAACA | 1839 |
| | CUCACAAGAAUCCUGAAAAAGGAUGCCAAACGAUGAGG | |
| | UCGGUGAGACAGG | |
| n/a | ACAGCUUAUUUGGAAGCUGAAAUGUGAGGUUUAUAACA | 1840 |
| | CUCACAAGAAUCCUGAAAAAGGAUGCCAAACUGGUGCC | |
| | ACUGUGGAGCAAC | |
| n/a | ACAGCUUAUUUGGAAGCUGAAAUGUGAGGUUUAUAACA | 1841 |
| | CUCACAAGAAUCCUGAAAAAGGAUGCCAAACGGCAUGG | |
| | AUACCAAAGGCUU | |
| n/a | ACAGCUUAUUUGGAAGCUGAAAUGUGAGGUUUAUAACA | 1842 |
| | CUCACAAGAAUCCUGAAAAAGGAUGCCAAACAGCAGGC | |
| | AAGCGGGGAGGGC | |
| n/a | ACAGCUUAUUUGGAAGCUGAAAUGUGAGGUUUAUAACA | 1843 |
| | CUCACAAGAAUCCUGAAAAAGGAUGCCAAACAGUCCCA | |
| | AGCCUUCUGUGGG | |
| n/a | ACAGCUUAUUUGGAAGCUGAAAUGUGAGGUUUAUAACA | 1844 |
| | CUCACAAGAAUCCUGAAAAAGGAUGCCAAACAUAGCUC | |
| | AGAGCAAGCUAAA | |
| n/a | ACAGCUUAUUUGGAAGCUGAAAUGUGAGGUUUAUAACA | 1845 |
| | CUCACAAGAAUCCUGAAAAAGGAUGCCAAACGGGAUAA | |
| | AACUGAGCAGGCA | |
| n/a | ACAGCUUAUUUGGAAGCUGAAAUGUGAGGUUUAUAACA | 1846 |
| | CUCACAAGAAUCCUGAAAAAGGAUGCCAAACAGCAGUC | |
| | CAGACCAGAGCCU | |
| n/a | ACAGCUUAUUUGGAAGCUGAAAUGUGAGGUUUAUAACA | 1847 |
| | CUCACAAGAAUCCUGAAAAAGGAUGCCAAACUGGGCUA | |
| | GAUGGCUGGGUGG | |
| n/a | ACAGCUUAUUUGGAAGCUGAAAUGUGAGGUUUAUAACA | 1848 |
| | CUCACAAGAAUCCUGAAAAAGGAUGCCAAACGCUCAGA | |
| | GCAAGCUAAACAA | |
| n/a | ACAGCUUAUUUGGAAGCUGAAAUGUGAGGUUUAUAACA | 1849 |
| | CUCACAAGAAUCCUGAAAAAGGAUGCCAAACCUUCUAG | |
| | GGAUAAAACUGAG | |
| n/a | ACAGCUUAUUUGGAAGCUGAAAUGUGAGGUUUAUAACA | 1850 |
| | CUCACAAGAAUCCUGAAAAAGGAUGCCAAACCCCAUGC | |
| | UUUUCACGGCCAC | |
| n/a | ACAGCUUAUUUGGAAGCUGAAAUGUGAGGUUUAUAACA | 1851 |
| | CUCACAAGAAUCCUGAAAAAGGAUGCCAAACUAUUGGC | |
| | UCCAGGAUGGGAC | |
| n/a | ACAGCUUAUUUGGAAGCUGAAAUGUGAGGUUUAUAACA | 1852 |
| | CUCACAAGAAUCCUGAAAAAGGAUGCCAAACGGCAAAG | |
| | GUCACCUGCUGAG | |
| n/a | ACAGCUUAUUUGGAAGCUGAAAUGUGAGGUUUAUAACA | 1853 |
| | CUCACAAGAAUCCUGAAAAAGGAUGCCAAACCAGCCUA | |
| | GAGCCAGUGACAG | |
| n/a | ACAGCUUAUUUGGAAGCUGAAAUGUGAGGUUUAUAACA | 1854 |
| | CUCACAAGAAUCCUGAAAAAGGAUGCCAAACAAAAGCA | |
| | UGGGCAAUCUCAG | |
| n/a | ACAGCUUAUUUGGAAGCUGAAAUGUGAGGUUUAUAACA | 1855 |
| | CUCACAAGAAUCCUGAAAAAGGAUGCCAAACCUCCAGG | |
| | UAAUGCCCCUGGG | |
| n/a | ACAGCUUAUUUGGAAGCUGAAAUGUGAGGUUUAUAACA | 1856 |
| | CUCACAAGAAUCCUGAAAAAGGAUGCCAAACGCUACUC | |
| | CAGGUAAUGCCCC | |
| n/a | ACAGCUUAUUUGGAAGCUGAAAUGUGAGGUUUAUAACA | 1857 |
| | CUCACAAGAAUCCUGAAAAAGGAUGCCAAACUCCCCUG | |
| | UCUUUUCCUGUCU | |
| n/a | ACAGCUUAUUUGGAAGCUGAAAUGUGAGGUUUAUAACA | 1858 |
| | CUCACAAGAAUCCUGAAAAAGGAUGCCAAACUGCCCGC | |
| | UGUCCCAUCCUGG | |
| n/a | ACAGCUUAUUUGGAAGCUGAAAUGUGAGGUUUAUAACA | 1859 |
| | CUCACAAGAAUCCUGAAAAAGGAUGCCAAACCUCAGUU | |
| | UUAUCCCUAGAAG | |
| n/a | ACAGCUUAUUUGGAAGCUGAAAUGUGAGGUUUAUAACA | 1860 |
| | CUCACAAGAAUCCUGAAAAAGGAUGCCAAACCAGAGUA | |
| | UUUCUAUACUCCA | |
| n/a | ACAGCUUAUUUGGAAGCUGAAAUGUGAGGUUUAUAACA | 1861 |
| | CUCACAAGAAUCCUGAAAAAGGAUGCCAAACCUGUCCC | |
| | UUGUUUAGCUUGC | |
| n/a | ACAGCUUAUUUGGAAGCUGAAAUGUGAGGUUUAUAACA | 1862 |
| | CUCACAAGAAUCCUGAAAAAGGAUGCCAAACGGUGAGC | |
| | CGGUAGCUGAUCC | |
| n/a | ACAGCUUAUUUGGAAGCUGAAAUGUGAGGUUUAUAACA | 1863 |
| | CUCACAAGAAUCCUGAAAAAGGAUGCCAAACCUGGAAG | |
| | GCUUUCAGGUGGC | |
| n/a | ACAGCUUAUUUGGAAGCUGAAAUGUGAGGUUUAUAACA | 1864 |
| | CUCACAAGAAUCCUGAAAAAGGAUGCCAAACGGCCAAA | |
| | AGCCUUGCACUGG | |
| n/a | ACAGCUUAUUUGGAAGCUGAAAUGUGAGGUUUAUAACA | 1865 |
| | CUCACAAGAAUCCUGAAAAAGGAUGCCAAACCCCCUGG | |
| | GGAGGAGAGGAAG | |
| n/a | ACAGCUUAUUUGGAAGCUGAAAUGUGAGGUUUAUAACA | 1866 |
| | CUCACAAGAAUCCUGAAAAAGGAUGCCAAACCUGUAGU | |
| | UCUCUAUCUAAUA | |
| n/a | ACAGCUUAUUUGGAAGCUGAAAUGUGAGGUUUAUAACA | 1867 |
| | CUCACAAGAAUCCUGAAAAAGGAUGCCAAACGGUCUAC | |
| | UGUAGUUCUCUAU | |
| n/a | ACAGCUUAUUUGGAAGCUGAAAUGUGAGGUUUAUAACA | 1868 |
| | CUCACAAGAAUCCUGAAAAAGGAUGCCAAACUCUAAUA | |
| | UCAGUGGGAGAAA | |
| n/a | ACAGCUUAUUUGGAAGCUGAAAUGUGAGGUUUAUAACA | 1869 |
| | CUCACAAGAAUCCUGAAAAAGGAUGCCAAACAUCCCUU | |
| | GGUGGCGGAGGUG | |
| n/a | ACAGCUUAUUUGGAAGCUGAAAUGUGAGGUUUAUAACA | 1870 |
| | CUCACAAGAAUCCUGAAAAAGGAUGCCAAACGAUGUCC | |
| | CGUUCUGCAGAGU | |
| n/a | ACAGCUUAUUUGGAAGCUGAAAUGUGAGGUUUAUAACA | 1871 |
| | CUCACAAGAAUCCUGAAAAAGGAUGCCAAACCCUGCUC | |
| | AGUUUUAUCCCUA | |
| n/a | ACAGCUUAUUUGGAAGCUGAAAUGUGAGGUUUAUAACA | 1872 |
| | CUCACAAGAAUCCUGAAAAAGGAUGCCAAACAAACAGG | |
| | UCACAGCCCUCCC | |
| n/a | ACAGCUUAUUUGGAAGCUGAAAUGUGAGGUUUAUAACA | 1873 |
| | CUCACAAGAAUCCUGAAAAAGGAUGCCAAACUCACUGG | |
| | CUCUAGGCUGUAA | |
| n/a | ACAGCUUAUUUGGAAGCUGAAAUGUGAGGUUUAUAACA | 1874 |
| | CUCACAAGAAUCCUGAAAAAGGAUGCCAAACCUCUGAG | |
| | CUAUUAGAAGCCU | |
| n/a | ACAGCUUAUUUGGAAGCUGAAAUGUGAGGUUUAUAACA | 1875 |
| | CUCACAAGAAUCCUGAAAAAGGAUGCCAAACAUCCCUG | |
| | CCCAGCUACGGCA | |
| n/a | ACAGCUUAUUUGGAAGCUGAAAUGUGAGGUUUAUAACA | 1876 |
| | CUCACAAGAAUCCUGAAAAAGGAUGCCAAACGCUUCUG | |
| | UGAAGGAGCCUGU | |
| n/a | ACAGCUUAUUUGGAAGCUGAAAUGUGAGGUUUAUAACA | 1877 |
| | CUCACAAGAAUCCUGAAAAAGGAUGCCAAACUAGUUCU | |
| | CUAUCUAAUAUCA | |
| n/a | ACAGCUUAUUUGGAAGCUGAAAUGUGAGGUUUAUAACA | 1878 |
| | CUCACAAGAAUCCUGAAAAAGGAUGCCAAACCGGCAGA | |
| | GGAGACUGUUGGG | |
| n/a | ACAGCUUAUUUGGAAGCUGAAAUGUGAGGUUUAUAACA | 1879 |
| | CUCACAAGAAUCCUGAAAAAGGAUGCCAAACAAGGAGC | |
| | CUGUCACUGGCUC | |
| n/a | ACAGCUUAUUUGGAAGCUGAAAUGUGAGGUUUAUAACA | 1880 |
| | CUCACAAGAAUCCUGAAAAAGGAUGCCAAACGCCCACA | |
| | GAAGGCUUGGGAC | |
| n/a | ACAGCUUAUUUGGAAGCUGAAAUGUGAGGUUUAUAACA | 1881 |
| | CUCACAAGAAUCCUGAAAAAGGAUGCCAAACUCCCUAG | |
| | AAGCAGCUAGCUA | |
| n/a | ACAGCUUAUUUGGAAGCUGAAAUGUGAGGUUUAUAACA | 1882 |
| | CUCACAAGAAUCCUGAAAAAGGAUGCCAAACCCUACCC | |
| | AGGACUGAAAAAA | |
| n/a | ACAGCUUAUUUGGAAGCUGAAAUGUGAGGUUUAUAACA | 1883 |
| | CUCACAAGAAUCCUGAAAAAGGAUGCCAAACUUGUUUC | |
| | UCAGCAUAUUAGA | |
| n/a | ACAGCUUAUUUGGAAGCUGAAAUGUGAGGUUUAUAACA | 1884 |
| | CUCACAAGAAUCCUGAAAAAGGAUGCCAAACUUGGGAU | |
| | CACAGGUGGAGGU | |
| n/a | ACAGCUUAUUUGGAAGCUGAAAUGUGAGGUUUAUAACA | 1885 |
| | CUCACAAGAAUCCUGAAAAAGGAUGCCAAACGCAGAUG | |
| | GCUGCAUGGCCUU | |
| n/a | ACAGCUUAUUUGGAAGCUGAAAUGUGAGGUUUAUAACA | 1886 |
| | CUCACAAGAAUCCUGAAAAAGGAUGCCAAACCCUCAGG | |
| | CUCUGGUCUGGAC | |
| n/a | ACAGCUUAUUUGGAAGCUGAAAUGUGAGGUUUAUAACA | 1887 |
| | CUCACAAGAAUCCUGAAAAAGGAUGCCAAACACCUUUG | |
| | CCCAGCUCACUGG | |
| n/a | ACAGCUUAUUUGGAAGCUGAAAUGUGAGGUUUAUAACA | 1888 |
| | CUCACAAGAAUCCUGAAAAAGGAUGCCAAACGUAUCCA | |
| | UGCCUACCCAGGA | |
| n/a | ACAGCUUAUUUGGAAGCUGAAAUGUGAGGUUUAUAACA | 1889 |
| | CUCACAAGAAUCCUGAAAAAGGAUGCCAAACGAAGCCU | |
| | UUGGUAUCCAUGC | |
| n/a | ACAGCUUAUUUGGAAGCUGAAAUGUGAGGUUUAUAACA | 1890 |
| | CUCACAAGAAUCCUGAAAAAGGAUGCCAAACGGGGCAU | |
| | GUAACCUUCACUC | |
| n/a | ACAGCUUAUUUGGAAGCUGAAAUGUGAGGUUUAUAACA | 1891 |
| | CUCACAAGAAUCCUGAAAAAGGAUGCCAAACGGGAAAG | |
| | GGAGGCUAUGGGC | |
| n/a | ACAGCUUAUUUGGAAGCUGAAAUGUGAGGUUUAUAACA | 1892 |
| | CUCACAAGAAUCCUGAAAAAGGAUGCCAAACUGAAGGA | |
| | GCCUGUCACUGGC | |
| n/a | ACAGCUUAUUUGGAAGCUGAAAUGUGAGGUUUAUAACA | 1893 |
| | CUCACAAGAAUCCUGAAAAAGGAUGCCAAACGGGGGGG | |
| | CUAGAAGCUGGGG | |
| n/a | ACAGCUUAUUUGGAAGCUGAAAUGUGAGGUUUAUAACA | 1894 |
| | CUCACAAGAAUCCUGAAAAAGGAUGCCAAACGGUAGUG | |
| | GCAGAGCUGCCUG | |
| n/a | ACAGCUUAUUUGGAAGCUGAAAUGUGAGGUUUAUAACA | 1895 |
| | CUCACAAGAAUCCUGAAAAAGGAUGCCAAACUCCCAUC | |
| | CUGGAGCCAAUAU | |
| n/a | ACAGCUUAUUUGGAAGCUGAAAUGUGAGGUUUAUAACA | 1896 |
| | CUCACAAGAAUCCUGAAAAAGGAUGCCAAACGAAGCUG | |
| | GGGAAAGGGAGGC | |
| n/a | ACAGCUUAUUUGGAAGCUGAAAUGUGAGGUUUAUAACA | 1897 |
| | CUCACAAGAAUCCUGAAAAAGGAUGCCAAACGCUGAUC | |
| | CCUUGGUGGCGGA | |
| n/a | ACAGCUUAUUUGGAAGCUGAAAUGUGAGGUUUAUAACA | 1898 |
| | CUCACAAGAAUCCUGAAAAAGGAUGCCAAACGCGAGGA | |
| | AAAGAAACCUAUU | |
| n/a | ACAGCUUAUUUGGAAGCUGAAAUGUGAGGUUUAUAACA | 1899 |
| | CUCACAAGAAUCCUGAAAAAGGAUGCCAAACGACUGCU | |
| | CAGCAGGUGACCU | |
| n/a | ACAGCUUAUUUGGAAGCUGAAAUGUGAGGUUUAUAACA | 1900 |
| | CUCACAAGAAUCCUGAAAAAGGAUGCCAAACGAAGGCU | |
| | UUCAGGUGGCUUC | |
| n/a | ACAGCUUAUUUGGAAGCUGAAAUGUGAGGUUUAUAACA | 1901 |
| | CUCACAAGAAUCCUGAAAAAGGAUGCCAAACAGGUCCA | |
| | AGGCUUGUCCCCU | |
| n/a | ACAGCUUAUUUGGAAGCUGAAAUGUGAGGUUUAUAACA | 1902 |
| | CUCACAAGAAUCCUGAAAAAGGAUGCCAAACUGGGGGG | |
| | GGCUAGAAGCUGG | |
| n/a | ACAGCUUAUUUGGAAGCUGAAAUGUGAGGUUUAUAACA | 1903 |
| | CUCACAAGAAUCCUGAAAAAGGAUGCCAAACUUUCUCA | |
| | GCAUAUUAGAGUA | |
| n/a | ACAGCUUAUUUGGAAGCUGAAAUGUGAGGUUUAUAACA | 1904 |
| | CUCACAAGAAUCCUGAAAAAGGAUGCCAAACGGCAAUC | |
| | UCAGAGGGAUUUC | |
| n/a | ACAGCUUAUUUGGAAGCUGAAAUGUGAGGUUUAUAACA | 1905 |
| | CUCACAAGAAUCCUGAAAAAGGAUGCCAAACAAGCAGG | |
| | CCUGAGGUCCAAG | |
| n/a | ACAGCUUAUUUGGAAGCUGAAAUGUGAGGUUUAUAACA | 1906 |
| | CUCACAAGAAUCCUGAAAAAGGAUGCCAAACUCUCACC | |
| | GACCUCAUCUAGG | |
| n/a | ACAGCUUAUUUGGAAGCUGAAAUGUGAGGUUUAUAACA | 1907 |
| | CUCACAAGAAUCCUGAAAAAGGAUGCCAAACUCCCGUU | |
| | CUGCAGAGUAUUU | |
| n/a | ACAGCUUAUUUGGAAGCUGAAAUGUGAGGUUUAUAACA | 1908 |
| | CUCACAAGAAUCCUGAAAAAGGAUGCCAAACUCAGUGG | |
| | GAGAAAGGCUUGG | |
| n/a | ACAGCUUAUUUGGAAGCUGAAAUGUGAGGUUUAUAACA | 1909 |
| | CUCACAAGAAUCCUGAAAAAGGAUGCCAAACGAAGCAG | |
| | CUAGCUACUCCAG | |
| n/a | ACAGCUUAUUUGGAAGCUGAAAUGUGAGGUUUAUAACA | 1910 |
| | CUCACAAGAAUCCUGAAAAAGGAUGCCAAACAUAUCAG | |
| | UGGGAGAAAGGCU | |
| n/a | ACAGCUUAUUUGGAAGCUGAAAUGUGAGGUUUAUAACA | 1911 |
| | CUCACAAGAAUCCUGAAAAAGGAUGCCAAACAUGCCCC | |
| | UGGGGAGGAGAGG | |
| n/a | ACAGCUUAUUUGGAAGCUGAAAUGUGAGGUUUAUAACA | 1912 |
| | CUCACAAGAAUCCUGAAAAAGGAUGCCAAACUCCCUUG | |
| | UUUAGCUUGCUCU | |
| n/a | ACAGCUUAUUUGGAAGCUGAAAUGUGAGGUUUAUAACA | 1913 |
| | CUCACAAGAAUCCUGAAAAAGGAUGCCAAACCCCGCUG | |
| | UCCCAUCCUGGAG | |
| n/a | ACAGCUUAUUUGGAAGCUGAAAUGUGAGGUUUAUAACA | 1914 |
| | CUCACAAGAAUCCUGAAAAAGGAUGCCAAACGAGCCAA | |
| | UAUAAAACAGGUC | |
| n/a | ACAGCUUAUUUGGAAGCUGAAAUGUGAGGUUUAUAACA | 1915 |
| | CUCACAAGAAUCCUGAAAAAGGAUGCCAAACGCCUUCC | |
| | UGCCUCAGGCUCU | |
| n/a | ACAGCUUAUUUGGAAGCUGAAAUGUGAGGUUUAUAACA | 1916 |
| | CUCACAAGAAUCCUGAAAAAGGAUGCCAAACGGCUGUA | |
| | AAGCAGGCCUGAG | |
| n/a | ACAGCUUAUUUGGAAGCUGAAAUGUGAGGUUUAUAACA | 1917 |
| | CUCACAAGAAUCCUGAAAAAGGAUGCCAAACUAAAGCA | |
| | GGCCUGAGGUCCA | |
| n/a | ACAGCUUAUUUGGAAGCUGAAAUGUGAGGUUUAUAACA | 1918 |
| | CUCACAAGAAUCCUGAAAAAGGAUGCCAAACGCGGAGG | |
| | UGGCCGUGAAAAG | |
| n/a | ACAGCUUAUUUGGAAGCUGAAAUGUGAGGUUUAUAACA | 1919 |
| | CUCACAAGAAUCCUGAAAAAGGAUGCCAAACAGCCGGU | |
| | AGCUGAUCCCUUG | |
| n/a | ACAGCUUAUUUGGAAGCUGAAAUGUGAGGUUUAUAACA | 1920 |
| | CUCACAAGAAUCCUGAAAAAGGAUGCCAAACGUGGCGG | |
| | AGGUGGCCGUGAA | |
| n/a | ACAGCUUAUUUGGAAGCUGAAAUGUGAGGUUUAUAACA | 1921 |
| | CUCACAAGAAUCCUGAAAAAGGAUGCCAAACUACUCCA | |
| | CCUUCCACCCCAC | |
| n/a | ACAGCUUAUUUGGAAGCUGAAAUGUGAGGUUUAUAACA | 1922 |
| | CUCACAAGAAUCCUGAAAAAGGAUGCCAAACGUUCUCU | |
| | AUCUAAUAUCAGU | |
| n/a | ACAGCUUAUUUGGAAGCUGAAAUGUGAGGUUUAUAACA | 1923 |
| | CUCACAAGAAUCCUGAAAAAGGAUGCCAAACCCCAGCU | |
| | CACUGGGCCUUCU | |
| n/a | ACAGCUUAUUUGGAAGCUGAAAUGUGAGGUUUAUAACA | 1924 |
| | CUCACAAGAAUCCUGAAAAAGGAUGCCAAACUGGGCCA | |
| | AAAGCCUUGCACU | |
| n/a | ACAGCUUAUUUGGAAGCUGAAAUGUGAGGUUUAUAACA | 1925 |
| | CUCACAAGAAUCCUGAAAAAGGAUGCCAAACCUCCACC | |
| | UUCCACCCCACUU | |
| n/a | ACAGCUUAUUUGGAAGCUGAAAUGUGAGGUUUAUAACA | 1926 |
| | CUCACAAGAAUCCUGAAAAAGGAUGCCAAACGAGGUCA | |
| | GUGUGGGGGCAUG | |
| n/a | ACAGCUUAUUUGGAAGCUGAAAUGUGAGGUUUAUAACA | 1927 |
| | CUCACAAGAAUCCUGAAAAAGGAUGCCAAACCACUGGG | |
| | UAGUGGCAGAGCU | |
| n/a | ACAGCUUAUUUGGAAGCUGAAAUGUGAGGUUUAUAACA | 1928 |
| | CUCACAAGAAUCCUGAAAAAGGAUGCCAAACCCCAGGA | |
| | CUGAAAAAACUGA | |
| n/a | ACAGCUUAUUUGGAAGCUGAAAUGUGAGGUUUAUAACA | 1929 |
| | CUCACAAGAAUCCUGAAAAAGGAUGCCAAACCCUGCAA | |
| | UUGGGUCAUGCUG | |
| n/a | ACAGCUUAUUUGGAAGCUGAAAUGUGAGGUUUAUAACA | 1930 |
| | CUCACAAGAAUCCUGAAAAAGGAUGCCAAACCCCCCUC | |
| | CCACCCCACUUCC | |
| n/a | ACAGCUUAUUUGGAAGCUGAAAUGUGAGGUUUAUAACA | 1931 |
| | CUCACAAGAAUCCUGAAAAAGGAUGCCAAACGGAGAAA | |
| | GGCUUGGGAUUCA | |
| n/a | ACAGCUUAUUUGGAAGCUGAAAUGUGAGGUUUAUAACA | 1932 |
| | CUCACAAGAAUCCUGAAAAAGGAUGCCAAACUAACCUU | |
| | CACUCUGCCCCCU | |
| n/a | ACAGCUUAUUUGGAAGCUGAAAUGUGAGGUUUAUAACA | 1933 |
| | CUCACAAGAAUCCUGAAAAAGGAUGCCAAACCAUGGCC | |
| | UUCCUGCCUCAGG | |
| n/a | ACAGCUUAUUUGGAAGCUGAAAUGUGAGGUUUAUAACA | 1934 |
| | CUCACAAGAAUCCUGAAAAAGGAUGCCAAACUCCAUGC | |
| | CUACCCAGGACUG | |
| n/a | ACAGCUUAUUUGGAAGCUGAAAUGUGAGGUUUAUAACA | 1935 |
| | CUCACAAGAAUCCUGAAAAAGGAUGCCAAACCUCCACA | |
| | GUGGCACCACAGA | |
| n/a | ACAGCUUAUUUGGAAGCUGAAAUGUGAGGUUUAUAACA | 1936 |
| | CUCACAAGAAUCCUGAAAAAGGAUGCCAAACGGCCUUC | |
| | UGUGCCCGCUGUC | |
| n/a | ACAGCUUAUUUGGAAGCUGAAAUGUGAGGUUUAUAACA | 1937 |
| | CUCACAAGAAUCCUGAAAAAGGAUGCCAAACGUCUGGA | |
| | CUGCUCAGCAGGU | |
| n/a | ACAGCUUAUUUGGAAGCUGAAAUGUGAGGUUUAUAACA | 1938 |
| | CUCACAAGAAUCCUGAAAAAGGAUGCCAAACCUCAGCA | |
| | GGUGACCUUUGCC | |
| n/a | ACAGCUUAUUUGGAAGCUGAAAUGUGAGGUUUAUAACA | 1939 |
| | CUCACAAGAAUCCUGAAAAAGGAUGCCAAACGCUUGCU | |
| | CUGAGCUAUUAGA | |
| n/a | ACAGCUUAUUUGGAAGCUGAAAUGUGAGGUUUAUAACA | 1940 |
| | CUCACAAGAAUCCUGAAAAAGGAUGCCAAACUCCUUCU | |
| | CUCACUAAUCCCU | |
| n/a | ACAGCUUAUUUGGAAGCUGAAAUGUGAGGUUUAUAACA | 1941 |
| | CUCACAAGAAUCCUGAAAAAGGAUGCCAAACUUAGAGU | |
| | AGAUGUCCCGUUC | |
| n/a | ACAGCUUAUUUGGAAGCUGAAAUGUGAGGUUUAUAACA | 1942 |
| | CUCACAAGAAUCCUGAAAAAGGAUGCCAAACUAAAACA | |
| | GGUCACAGCCCUC | |
| n/a | ACAGCUUAUUUGGAAGCUGAAAUGUGAGGUUUAUAACA | 1943 |
| | CUCACAAGAAUCCUGAAAAAGGAUGCCAAACAGUCCUA | |
| | GCGAGGAAAAGAA | |
| n/a | ACAGCUUAUUUGGAAGCUGAAAUGUGAGGUUUAUAACA | 1944 |
| | CUCACAAGAAUCCUGAAAAAGGAUGCCAAACGAGGGAG | |
| | AAGCUCUCACCAC | |
| n/a | ACAGCUUAUUUGGAAGCUGAAAUGUGAGGUUUAUAACA | 1945 |
| | CUCACAAGAAUCCUGAAAAAGGAUGCCAAACGUCUCCA | |
| | CCCUUGGGUUCCU | |
| n/a | ACAGCUUAUUUGGAAGCUGAAAUGUGAGGUUUAUAACA | 1946 |
| | CUCACAAGAAUCCUGAAAAAGGAUGCCAAACCCCAGCU | |
| | ACGGCAGAGGAGA | |
| n/a | ACAGCUUAUUUGGAAGCUGAAAUGUGAGGUUUAUAACA | 1947 |
| | CUCACAAGAAUCCUGAAAAAGGAUGCCAAACUUUAGCU | |
| | UGCUCUGAGCUAU | |
| n/a | ACAGCUUAUUUGGAAGCUGAAAUGUGAGGUUUAUAACA | 1948 |
| | CUCACAAGAAUCCUGAAAAAGGAUGCCAAACGGACUCA | |
| | UGGUCUCCACCCU | |
| n/a | ACAGCUUAUUUGGAAGCUGAAAUGUGAGGUUUAUAACA | 1949 |
| | CUCACAAGAAUCCUGAAAAAGGAUGCCAAACGGUCAUG | |
| | CUGUCCCUUGUUU | |
| n/a | ACAGCUUAUUUGGAAGCUGAAAUGUGAGGUUUAUAACA | 1950 |
| | CUCACAAGAAUCCUGAAAAAGGAUGCCAAACGCCGUGA | |
| | AAAGCAUGGGCAA | |
| n/a | ACAGCUUAUUUGGAAGCUGAAAUGUGAGGUUUAUAACA | 1951 |
| | CUCACAAGAAUCCUGAAAAAGGAUGCCAAACUUAGAAG | |
| | CCUUUGGUAUCCA | |
| n/a | ACAGCUUAUUUGGAAGCUGAAAUGUGAGGUUUAUAACA | 1952 |
| | CUCACAAGAAUCCUGAAAAAGGAUGCCAAACGGAUCAC | |
| | AGGUGGAGGUCAG | |
| n/a | ACAGCUUAUUUGGAAGCUGAAAUGUGAGGUUUAUAACA | 1953 |
| | CUCACAAGAAUCCUGAAAAAGGAUGCCAAACCAAUUGG | |
| | GUCAUGCUGUCCC | |
| n/a | ACAGCUUAUUUGGAAGCUGAAAUGUGAGGUUUAUAACA | 1954 |
| | CUCACAAGAAUCCUGAAAAAGGAUGCCAAACGCUCUAG | |
| | GCUGUAAAGCAGG | |
| n/a | ACAGCUUAUUUGGAAGCUGAAAUGUGAGGUUUAUAACA | 1955 |
| | CUCACAAGAAUCCUGAAAAAGGAUGCCAAACGGUUCCU | |
| | GGUGUGGGGGGGG | |
| n/a | ACAGCUUAUUUGGAAGCUGAAAUGUGAGGUUUAUAACA | 1956 |
| | CUCACAAGAAUCCUGAAAAAGGAUGCCAAACGUGGCAG | |
| | AGCUGCCUGCAAU | |
| n/a | ACAGCUUAUUUGGAAGCUGAAAUGUGAGGUUUAUAACA | 1957 |
| | CUCACAAGAAUCCUGAAAAAGGAUGCCAAACGCACCAC | |
| | AGAUUCCCCAUUC | |
| n/a | ACAGCUUAUUUGGAAGCUGAAAUGUGAGGUUUAUAACA | 1958 |
| | CUCACAAGAAUCCUGAAAAAGGAUGCCAAACUUUCUAU | |
| | ACUCCACCUUCCA | |
| n/a | ACAGCUUAUUUGGAAGCUGAAAUGUGAGGUUUAUAACA | 1959 |
| | CUCACAAGAAUCCUGAAAAAGGAUGCCAAACGUGUGGG | |
| | GGGGGCUAGAAGC | |
| n/a | ACAGCUUAUUUGGAAGCUGAAAUGUGAGGUUUAUAACA | 1960 |
| | CUCACAAGAAUCCUGAAAAAGGAUGCCAAACACCUUCA | |
| | CUCUGCCCCCUCC | |
| n/a | ACAGCUUAUUUGGAAGCUGAAAUGUGAGGUUUAUAACA | 1961 |
| | CUCACAAGAAUCCUGAAAAAGGAUGCCAAACGCUGCAU | |
| | GGCCUUCCUGCCU | |
| n/a | ACAGCUUAUUUGGAAGCUGAAAUGUGAGGUUUAUAACA | 1962 |
| | CUCACAAGAAUCCUGAAAAAGGAUGCCAAACUGGGGGC | |
| | AUGUAACCUUCAC | |
| n/a | ACAGCUUAUUUGGAAGCUGAAAUGUGAGGUUUAUAACA | 1963 |
| | CUCACAAGAAUCCUGAAAAAGGAUGCCAAACGGGGGCU | |
| | GGGUCUACUGUAG | |
| n/a | ACAGCUUAUUUGGAAGCUGAAAUGUGAGGUUUAUAACA | 1964 |
| | CUCACAAGAAUCCUGAAAAAGGAUGCCAAACGCAGAGC | |
| | UGCCUGCAAUUGG | |
| n/a | ACAGCUUAUUUGGAAGCUGAAAUGUGAGGUUUAUAACA | 1965 |
| | CUCACAAGAAUCCUGAAAAAGGAUGCCAAACAAAAAAC | |
| | UGAGUCCUAGCGA | |
| n/a | ACAGCUUAUUUGGAAGCUGAAAUGUGAGGUUUAUAACA | 1966 |
| | CUCACAAGAAUCCUGAAAAAGGAUGCCAAACAGCUAUU | |
| | AGAAGCCUUUGGU | |
| n/a | ACAGCUUAUUUGGAAGCUGAAAUGUGAGGUUUAUAACA | 1967 |
| | CUCACAAGAAUCCUGAAAAAGGAUGCCAAACGGGAGGA | |
| | GAGGAAGGAAGGG | |
| n/a | ACAGCUUAUUUGGAAGCUGAAAUGUGAGGUUUAUAACA | 1968 |
| | CUCACAAGAAUCCUGAAAAAGGAUGCCAAACUCUUUUC | |
| | CUGUCUCACCGAC | |
| n/a | ACAGCUUAUUUGGAAGCUGAAAUGUGAGGUUUAUAACA | 1969 |
| | CUCACAAGAAUCCUGAAAAAGGAUGCCAAACGAGUAGA | |
| | UGUCCCGUUCUGC | |
| PL34554 | ACAGCUUAUUUGGAAGCUGAAAUGUGAGGUUUAUAACA | 2075 |
| | CUCACAAGAAUCCUGAAAAAGGAUGCCAAACCCUCGCC | |
| | GCGGCACAGGUGG | |
| PL34555 | ACAGCUUAUUUGGAAGCUGAAAUGUGAGGUUUAUAACA | 2076 |
| | CUCACAAGAAUCCUGAAAAAGGAUGCCAAACCCAGGCA | |
| | ACCUCCACGGAUC | |
| PL34556 | ACAGCUUAUUUGGAAGCUGAAAUGUGAGGUUUAUAACA | 2077 |
| | CUCACAAGAAUCCUGAAAAAGGAUGCCAAACGCGACCU | |
| | GCUGGAGCUGGUG | |
| PL34557 | ACAGCUUAUUUGGAAGCUGAAAUGUGAGGUUUAUAACA | 2078 |
| | CUCACAAGAAUCCUGAAAAAGGAUGCCAAACAGUGGCG | |
| | ACCUGCUGGAGCU | |
| PL34558 | ACAGCUUAUUUGGAAGCUGAAAUGUGAGGUUUAUAACA | 2079 |
| | CUCACAAGAAUCCUGAAAAAGGAUGCCAAACACUGUCA | |
| | CACUUGCUGGCCU | |
| PL34559 | ACAGCUUAUUUGGAAGCUGAAAUGUGAGGUUUAUAACA | 2080 |
| | CUCACAAGAAUCCUGAAAAAGGAUGCCAAACCUCCCCA | |
| | GCCUCAGCUCCCG | |
| PL34560 | ACAGCUUAUUUGGAAGCUGAAAUGUGAGGUUUAUAACA | 2081 |
| | CUCACAAGAAUCCUGAAAAAGGAUGCCAAACGCCCCAA | |
| | CUGUGAUGACCUG | |
| PL34561 | ACAGCUUAUUUGGAAGCUGAAAUGUGAGGUUUAUAACA | 2082 |
| | CUCACAAGAAUCCUGAAAAAGGAUGCCAAACCCCCCCA | |
| | GCACCCAUGGGGC | |
| PL34562 | ACAGCUUAUUUGGAAGCUGAAAUGUGAGGUUUAUAACA | 2083 |
| | CUCACAAGAAUCCUGAAAAAGGAUGCCAAACCAAAACA | |
| | GCUGCCAACCUGC | |
| R16925 | ACAGCUUAUUUGGAAGCUGAAAUGUGAGGUUUAUAACA | 2087 |
| | CUCACAAGAAUCCUGAAAAAGGAUGCCAAACACCCUGC | |
| | AUGAAGCUGAGAA | |
| R16926 | ACAGCUUAUUUGGAAGCUGAAAUGUGAGGUUUAUAACA | 2088 |
| | CUCACAAGAAUCCUGAAAAAGGAUGCCAAACGGAUUUG | |
| | GACCCUGAGGUCA | |
| R11498 | ACAGCUUAUUUGGAAGCUGAAAUGUGAGGUUUAUAACA | 2089 |
| | CUCACAAGAAUCCUGAAAAAGGAUGCCAAACGUACAAG | |
| | AGAUAGAAAGACC | |

TABLE 12
Exemplary Guide Nucleic Acids Targeting PCSK9 for CasM.265466
Effector Proteins

| | | SEQ ID |
|---|---|---|
| Guide ID | Guide sequence (shown as RNA), 5′- 3′ | NO: |
| R18133 | ACAGCUUAUUUGGAAGCUGAAAUGUGAGGUUUAUAACA | 585 |
| | CUCACAAGAAUCCUGAAAAAGGAUGCCAAACGAAGCGG | |
| | GUCCCGUCCUCCU | |
| R18134 | ACAGCUUAUUUGGAAGCUGAAAUGUGAGGUUUAUAACA | 586 |
| | CUCACAAGAAUCCUGAAAAAGGAUGCCAAACUCUAGGA | |
| | GAUACACCUCCAC | |
| R18135 | ACAGCUUAUUUGGAAGCUGAAAUGUGAGGUUUAUAACA | 587 |
| | CUCACAAGAAUCCUGAAAAAGGAUGCCAAACACCAUGA | |
| | CCCUGCCCUCGAU | |
| R18136 | ACAGCUUAUUUGGAAGCUGAAAUGUGAGGUUUAUAACA | 588 |
| | CUCACAAGAAUCCUGAAAAAGGAUGCCAAACACCCUGC | |
| | CCUCGAUUUCCCG | |
| R18137 | ACAGCUUAUUUGGAAGCUGAAAUGUGAGGUUUAUAACA | 589 |
| | CUCACAAGAAUCCUGAAAAAGGAUGCCAAACCCCUCGA | |
| | UUUCCCGGUGGUC | |
| R18138 | ACAGCUUAUUUGGAAGCUGAAAUGUGAGGUUUAUAACA | 590 |
| | CUCACAAGAAUCCUGAAAAAGGAUGCCAAACUAUGCUG | |
| | GUGUCUAGGAGAU | |
| R18139 | ACAGCUUAUUUGGAAGCUGAAAUGUGAGGUUUAUAACA | 591 |
| | CUCACAAGAAUCCUGAAAAAGGAUGCCAAACUGCUGGU | |
| | GUCUAGGAGAUAC | |
| R18140 | ACAGCUUAUUUGGAAGCUGAAAUGUGAGGUUUAUAACA | 592 |
| | CUCACAAGAAUCCUGAAAAAGGAUGCCAAACGUCACUC | |
| | UGUAUGCUGGUGU | |
| R18141 | ACAGCUUAUUUGGAAGCUGAAAUGUGAGGUUUAUAACA | 593 |
| | CUCACAAGAAUCCUGAAAAAGGAUGCCAAACUGGAAGC | |
| | GGGUCCCGUCCUC | |
| R18142 | ACAGCUUAUUUGGAAGCUGAAAUGUGAGGUUUAUAACA | 594 |
| | CUCACAAGAAUCCUGAAAAAGGAUGCCAAACCUGGUGU | |
| | CUAGGAGAUACAC | |
| R18143 | ACAGCUUAUUUGGAAGCUGAAAUGUGAGGUUUAUAACA | 595 |
| | CUCACAAGAAUCCUGAAAAAGGAUGCCAAACGGAGAUA | |
| | CACCUCCACCAGG | |
| R18144 | ACAGCUUAUUUGGAAGCUGAAAUGUGAGGUUUAUAACA | 596 |
| | CUCACAAGAAUCCUGAAAAAGGAUGCCAAACGUGUCUA | |
| | GGAGAUACACCUC | |
| R18145 | ACAGCUUAUUUGGAAGCUGAAAUGUGAGGUUUAUAACA | 597 |
| | CUCACAAGAAUCCUGAAAAAGGAUGCCAAACCACCUCC | |
| | ACCAGGCUGCCUC | |
| R18146 | ACAGCUUAUUUGGAAGCUGAAAUGUGAGGUUUAUAACA | 598 |
| | CUCACAAGAAUCCUGAAAAAGGAUGCCAAACGACACCA | |
| | GCAUACAGAGUGA | |
| R18147 | ACAGCUUAUUUGGAAGCUGAAAUGUGAGGUUUAUAACA | 599 |
| | CUCACAAGAAUCCUGAAAAAGGAUGCCAAACUGCCCGA | |
| | GGAGGACGGGACC | |
| R18148 | ACAGCUUAUUUGGAAGCUGAAAUGUGAGGUUUAUAACA | 600 |
| | CUCACAAGAAUCCUGAAAAAGGAUGCCAAACGUGGAGG | |
| | UGUAUCUCCUAGA | |
| R18149 | ACAGCUUAUUUGGAAGCUGAAAUGUGAGGUUUAUAACA | 601 |
| | CUCACAAGAAUCCUGAAAAAGGAUGCCAAACUCUCCUA | |
| | GACACCAGCAUAC | |
| R18150 | ACAGCUUAUUUGGAAGCUGAAAUGUGAGGUUUAUAACA | 602 |
| | CUCACAAGAAUCCUGAAAAAGGAUGCCAAACCAGAGUG | |
| | ACCACCGGGAAAU | |
| R18151 | ACAGCUUAUUUGGAAGCUGAAAUGUGAGGUUUAUAACA | 603 |
| | CUCACAAGAAUCCUGAAAAAGGAUGCCAAACUAUCUCC | |
| | UAGACACCAGCAU | |
| R18152 | ACAGCUUAUUUGGAAGCUGAAAUGUGAGGUUUAUAACA | 604 |
| | CUCACAAGAAUCCUGAAAAAGGAUGCCAAACACCACCG | |
| | GGAAAUCGAGGGC | |
| R18153 | ACAGCUUAUUUGGAAGCUGAAAUGUGAGGUUUAUAACA | 605 |
| | CUCACAAGAAUCCUGAAAAAGGAUGCCAAACGAGGUGU | |
| | AUCUCCUAGACAC | |
| R18154 | ACAGCUUAUUUGGAAGCUGAAAUGUGAGGUUUAUAACA | 606 |
| | CUCACAAGAAUCCUGAAAAAGGAUGCCAAACCCCGAGG | |
| | AGGACGGGACCCG | |
| R18123 | ACAGCUUAUUUGGAAGCUGAAAUGUGAGGUUUAUAACA | 607 |
| | CUCACAAGAAUCCUGAAAAAGGAUGCCAAACCCCUUCC | |
| | CUUGGCAGUUGAG | |
| R18124 | ACAGCUUAUUUGGAAGCUGAAAUGUGAGGUUUAUAACA | 608 |
| | CUCACAAGAAUCCUGAAAAAGGAUGCCAAACGCAGUUG | |
| | AGCACGCGCAGGC | |
| R18125 | ACAGCUUAUUUGGAAGCUGAAAUGUGAGGUUUAUAACA | 609 |
| | CUCACAAGAAUCCUGAAAAAGGAUGCCAAACACCGUGC | |
| | CCUUCCCUUGGCA | |
| R18126 | ACAGCUUAUUUGGAAGCUGAAAUGUGAGGUUUAUAACA | 610 |
| | CUCACAAGAAUCCUGAAAAAGGAUGCCAAACGCCACGC | |
| | CGGCAUCCCGGCC | |
| R18127 | ACAGCUUAUUUGGAAGCUGAAAUGUGAGGUUUAUAACA | 611 |
| | CUCACAAGAAUCCUGAAAAAGGAUGCCAAACACCACCC | |
| | CUGCCAGGUGGGU | |
| R18128 | ACAGCUUAUUUGGAAGCUGAAAUGUGAGGUUUAUAACA | 612 |
| | CUCACAAGAAUCCUGAAAAAGGAUGCCAAACGCAGGGG | |
| | UGGUCAGCGGCCG | |
| R18129 | ACAGCUUAUUUGGAAGCUGAAAUGUGAGGUUUAUAACA | 613 |
| | CUCACAAGAAUCCUGAAAAAGGAUGCCAAACCUCAACU | |
| | GCCAAGGGAAGGG | |
| R18130 | ACAGCUUAUUUGGAAGCUGAAAUGUGAGGUUUAUAACA | 614 |
| | CUCACAAGAAUCCUGAAAAAGGAUGCCAAACGUCAGCG | |
| | GCCGGGAUGCCGG | |
| R18131 | ACAGCUUAUUUGGAAGCUGAAAUGUGAGGUUUAUAACA | 615 |
| | CUCACAAGAAUCCUGAAAAAGGAUGCCAAACCGCGUGC | |
| | UCAACUGCCAAGG | |
| R18132 | ACAGCUUAUUUGGAAGCUGAAAUGUGAGGUUUAUAACA | 616 |
| | CUCACAAGAAUCCUGAAAAAGGAUGCCAAACGCACCCA | |
| | CCUGGCAGGGGUG | |
| R18103 | ACAGCUUAUUUGGAAGCUGAAAUGUGAGGUUUAUAACA | 617 |
| | CUCACAAGAAUCCUGAAAAAGGAUGCCAAACCCGGCAG | |
| | CGGUGACCAGCAC | |
| R18104 | ACAGCUUAUUUGGAAGCUGAAAUGUGAGGUUUAUAACA | 618 |
| | CUCACAAGAAUCCUGAAAAAGGAUGCCAAACGCUUUUC | |
| | CGAAUAAACUCCA | |
| R18105 | ACAGCUUAUUUGGAAGCUGAAAUGUGAGGUUUAUAACA | 619 |
| | CUCACAAGAAUCCUGAAAAAGGAUGCCAAACUACCCAC | |
| | CCGCCAGGGGCAG | |
| R18106 | ACAGCUUAUUUGGAAGCUGAAAUGUGAGGUUUAUAACA | 620 |
| | CUCACAAGAAUCCUGAAAAAGGAUGCCAAACGACCAGC | |
| | UGGCUUUUCCGAA | |
| R18107 | ACAGCUUAUUUGGAAGCUGAAAUGUGAGGUUUAUAACA | 621 |
| | CUCACAAGAAUCCUGAAAAAGGAUGCCAAACCCCACCC | |
| | GCCAGGGGCAGCA | |
| R18108 | ACAGCUUAUUUGGAAGCUGAAAUGUGAGGUUUAUAACA | 622 |
| | CUCACAAGAAUCCUGAAAAAGGAUGCCAAACGGGAGUA | |
| | GAGGCAGGCAUCG | |
| R18109 | ACAGCUUAUUUGGAAGCUGAAAUGUGAGGUUUAUAACA | 623 |
| | CUCACAAGAAUCCUGAAAAAGGAUGCCAAACACCAGCA | |
| | CGACCCCAGCCCU | |
| R18110 | ACAGCUUAUUUGGAAGCUGAAAUGUGAGGUUUAUAACA | 624 |
| | CUCACAAGAAUCCUGAAAAAGGAUGCCAAACGAGGCAG | |
| | GCAUCGUCCCGGA | |
| R18111 | ACAGCUUAUUUGGAAGCUGAAAUGUGAGGUUUAUAACA | 625 |
| | CUCACAAGAAUCCUGAAAAAGGAUGCCAAACCCCCUGG | |
| | CGGGUGGGUACAG | |
| R18112 | ACAGCUUAUUUGGAAGCUGAAAUGUGAGGUUUAUAACA | 626 |
| | CUCACAAGAAUCCUGAAAAAGGAUGCCAAACGGGUCGU | |
| | GCUGGUCACCGCU | |
| R18113 | ACAGCUUAUUUGGAAGCUGAAAUGUGAGGUUUAUAACA | 627 |
| | CUCACAAGAAUCCUGAAAAAGGAUGCCAAACCUGGUCA | |
| | CCGCUGCCGGCAA | |
| R18114 | ACAGCUUAUUUGGAAGCUGAAAUGUGAGGUUUAUAACA | 628 |
| | CUCACAAGAAUCCUGAAAAAGGAUGCCAAACGUCACCG | |
| | CUGCCGGCAACUU | |
| R18115 | ACAGCUUAUUUGGAAGCUGAAAUGUGAGGUUUAUAACA | 629 |
| | CUCACAAGAAUCCUGAAAAAGGAUGCCAAACCUGCCCC | |
| | UGGCGGGUGGGUA | |
| R18116 | ACAGCUUAUUUGGAAGCUGAAAUGUGAGGUUUAUAACA | 630 |
| | CUCACAAGAAUCCUGAAAAAGGAUGCCAAACGAGUUUA | |
| | UUCGGAAAAGCCA | |
| R18117 | ACAGCUUAUUUGGAAGCUGAAAUGUGAGGUUUAUAACA | 631 |
| | CUCACAAGAAUCCUGAAAAAGGAUGCCAAACGCGAGGG | |
| | CUGGGGUCGUGCU | |
| R18118 | ACAGCUUAUUUGGAAGCUGAAAUGUGAGGUUUAUAACA | 632 |
| | CUCACAAGAAUCCUGAAAAAGGAUGCCAAACCUGCUGC | |
| | CCCUGGCGGGUGG | |
| R18119 | ACAGCUUAUUUGGAAGCUGAAAUGUGAGGUUUAUAACA | 633 |
| | CUCACAAGAAUCCUGAAAAAGGAUGCCAAACUUCGGAA | |
| | AAGCCAGCUGGUC | |
| R18120 | ACAGCUUAUUUGGAAGCUGAAAUGUGAGGUUUAUAACA | 634 |
| | CUCACAAGAAUCCUGAAAAAGGAUGCCAAACCCUGCCU | |
| | CUACUCCCCAGCC | |
| R18121 | ACAGCUUAUUUGGAAGCUGAAAUGUGAGGUUUAUAACA | 635 |
| | CUCACAAGAAUCCUGAAAAAGGAUGCCAAACCCAGCGC | |
| | CUGGCGAGGGCUG | |
| R18122 | ACAGCUUAUUUGGAAGCUGAAAUGUGAGGUUUAUAACA | 636 |
| | CUCACAAGAAUCCUGAAAAAGGAUGCCAAACCCGGCAA | |
| | CUUCCGGGACGAU | |
| R18082 | ACAGCUUAUUUGGAAGCUGAAAUGUGAGGUUUAUAACA | 637 |
| | CUCACAAGAAUCCUGAAAAAGGAUGCCAAACUCCUCCC | |
| | CUGGGGCAAAGAG | |
| R18083 | ACAGCUUAUUUGGAAGCUGAAAUGUGAGGUUUAUAACA | 638 |
| | CUCACAAGAAUCCUGAAAAAGGAUGCCAAACGAGGCAC | |
| | CAAUGAUGUCCUC | |
| R18084 | ACAGCUUAUUUGGAAGCUGAAAUGUGAGGUUUAUAACA | 639 |
| | CUCACAAGAAUCCUGAAAAAGGAUGCCAAACGGCAUUG | |
| | GUGGCCCCAACUG | |
| R18085 | ACAGCUUAUUUGGAAGCUGAAAUGUGAGGUUUAUAACA | 640 |
| | CUCACAAGAAUCCUGAAAAAGGAUGCCAAACAUGUCCU | |
| | CCCCUGGGGCAAA | |
| R18086 | ACAGCUUAUUUGGAAGCUGAAAUGUGAGGUUUAUAACA | 641 |
| | CUCACAAGAAUCCUGAAAAAGGAUGCCAAACACACAAA | |
| | GCAGGUGCUGCAG | |
| R18087 | ACAGCUUAUUUGGAAGCUGAAAUGUGAGGUUUAUAACA | 642 |
| | CUCACAAGAAUCCUGAAAAAGGAUGCCAAACGUGGCCC | |
| | CAACUGUGAUGAC | |
| R18088 | ACAGCUUAUUUGGAAGCUGAAAUGUGAGGUUUAUAACA | 643 |
| | CUCACAAGAAUCCUGAAAAAGGAUGCCAAACCUGCAGU | |
| | CGCUGGAGGCACC | |
| R18089 | ACAGCUUAUUUGGAAGCUGAAAUGUGAGGUUUAUAACA | 644 |
| | CUCACAAGAAUCCUGAAAAAGGAUGCCAAACCAGUCGC | |
| | UGGAGGCACCAAU | |
| R18090 | ACAGCUUAUUUGGAAGCUGAAAUGUGAGGUUUAUAACA | 645 |
| | CUCACAAGAAUCCUGAAAAAGGAUGCCAAACGUCCCCA | |
| | AAGUCCCCAGGGU | |
| R18091 | ACAGCUUAUUUGGAAGCUGAAAUGUGAGGUUUAUAACA | 646 |
| | CUCACAAGAAUCCUGAAAAAGGAUGCCAAACGGGCAAA | |
| | GAGGUCCACACAG | |
| R18092 | ACAGCUUAUUUGGAAGCUGAAAUGUGAGGUUUAUAACA | 647 |
| | CUCACAAGAAUCCUGAAAAAGGAUGCCAAACGUGCCUC | |
| | CAGCGACUGCAGC | |
| R18093 | ACAGCUUAUUUGGAAGCUGAAAUGUGAGGUUUAUAACA | 648 |
| | CUCACAAGAAUCCUGAAAAAGGAUGCCAAACCCUCCAG | |
| | CGACUGCAGCACC | |
| R18094 | ACAGCUUAUUUGGAAGCUGAAAUGUGAGGUUUAUAACA | 649 |
| | CUCACAAGAAUCCUGAAAAAGGAUGCCAAACGCCGCUG | |
| | UGUGGACCUCUUU | |
| R18095 | ACAGCUUAUUUGGAAGCUGAAAUGUGAGGUUUAUAACA | 650 |
| | CUCACAAGAAUCCUGAAAAAGGAUGCCAAACGACCUCU | |
| | UUGCCCCAGGGGA | |
| R18096 | ACAGCUUAUUUGGAAGCUGAAAUGUGAGGUUUAUAACA | 651 |
| | CUCACAAGAAUCCUGAAAAAGGAUGCCAAACACCCUGG | |
| | GGACUUUGGGGAC | |
| R18097 | ACAGCUUAUUUGGAAGCUGAAAUGUGAGGUUUAUAACA | 652 |
| | CUCACAAGAAUCCUGAAAAAGGAUGCCAAACUGGACCU | |
| | CUUUGCCCCAGGG | |
| R18098 | ACAGCUUAUUUGGAAGCUGAAAUGUGAGGUUUAUAACA | 653 |
| | CUCACAAGAAUCCUGAAAAAGGAUGCCAAACCAGCACC | |
| | UGCUUUGUGUCAC | |
| R18099 | ACAGCUUAUUUGGAAGCUGAAAUGUGAGGUUUAUAACA | 654 |
| | CUCACAAGAAUCCUGAAAAAGGAUGCCAAACGGGACCA | |
| | ACUUUGGCCGCUG | |
| R18100 | ACAGCUUAUUUGGAAGCUGAAAUGUGAGGUUUAUAACA | 655 |
| | CUCACAAGAAUCCUGAAAAAGGAUGCCAAACGGGACUU | |
| | UGGGGACCAACUU | |
| R18101 | ACAGCUUAUUUGGAAGCUGAAAUGUGAGGUUUAUAACA | 656 |
| | CUCACAAGAAUCCUGAAAAAGGAUGCCAAACUGUGGAC | |
| | CUCUUUGCCCCAG | |
| R18102 | ACAGCUUAUUUGGAAGCUGAAAUGUGAGGUUUAUAACA | 657 |
| | CUCACAAGAAUCCUGAAAAAGGAUGCCAAACCCCCAGG | |
| | GGAGGACAUCAUU | |
| R18066 | ACAGCUUAUUUGGAAGCUGAAAUGUGAGGUUUAUAACA | 658 |
| | CUCACAAGAAUCCUGAAAAAGGAUGCCAAACGAUCAGU | |
| | CUCUGCCUCAACU | |
| R18067 | ACAGCUUAUUUGGAAGCUGAAAUGUGAGGUUUAUAACA | 659 |
| | CUCACAAGAAUCCUGAAAAAGGAUGCCAAACGCAGAGA | |
| | AGUGGAUCAGUCU | |
| R18068 | ACAGCUUAUUUGGAAGCUGAAAUGUGAGGUUUAUAACA | 660 |
| | CUCACAAGAAUCCUGAAAAAGGAUGCCAAACAGCUCCG | |
| | GCUCGGCAGACAG | |
| R18069 | ACAGCUUAUUUGGAAGCUGAAAUGUGAGGUUUAUAACA | 661 |
| | CUCACAAGAAUCCUGAAAAAGGAUGCCAAACGUCCUCA | |
| | GGGAACCAGGCCU | |
| R18070 | ACAGCUUAUUUGGAAGCUGAAAUGUGAGGUUUAUAACA | 662 |
| | CUCACAAGAAUCCUGAAAAAGGAUGCCAAACAUGACAU | |
| | CUUUGGCAGAGAA | |
| R18071 | ACAGCUUAUUUGGAAGCUGAAAUGUGAGGUUUAUAACA | 663 |
| | CUCACAAGAAUCCUGAAAAAGGAUGCCAAACACAUCUU | |
| | UGGCAGAGAAGUG | |
| R18072 | ACAGCUUAUUUGGAAGCUGAAAUGUGAGGUUUAUAACA | 664 |
| | CUCACAAGAAUCCUGAAAAAGGAUGCCAAACCUGUCUG | |
| | CCGAGCCGGAGCU | |
| R18073 | ACAGCUUAUUUGGAAGCUGAAAUGUGAGGUUUAUAACA | 665 |
| | CUCACAAGAAUCCUGAAAAAGGAUGCCAAACCAGCCAU | |
| | GAUGCUGUCUGCC | |
| R18074 | ACAGCUUAUUUGGAAGCUGAAAUGUGAGGUUUAUAACA | 666 |
| | CUCACAAGAAUCCUGAAAAAGGAUGCCAAACAUCCACU | |
| | UCUCUGCCAAAGA | |
| R18075 | ACAGCUUAUUUGGAAGCUGAAAUGUGAGGUUUAUAACA | 667 |
| | CUCACAAGAAUCCUGAAAAAGGAUGCCAAACAGGCCUG | |
| | GUUCCCUGAGGAC | |
| R18076 | ACAGCUUAUUUGGAAGCUGAAAUGUGAGGUUUAUAACA | 668 |
| | CUCACAAGAAUCCUGAAAAAGGAUGCCAAACAUGCUGU | |
| | CUGCCGAGCCGGA | |
| R18077 | ACAGCUUAUUUGGAAGCUGAAAUGUGAGGUUUAUAACA | 669 |
| | CUCACAAGAAUCCUGAAAAAGGAUGCCAAACAGGCAGA | |
| | GACUGAUCCACUU | |
| R18078 | ACAGCUUAUUUGGAAGCUGAAAUGUGAGGUUUAUAACA | 670 |
| | CUCACAAGAAUCCUGAAAAAGGAUGCCAAACCCAAAGA | |
| | UGUCAUCAAUGAG | |
| R18079 | ACAGCUUAUUUGGAAGCUGAAAUGUGAGGUUUAUAACA | 671 |
| | CUCACAAGAAUCCUGAAAAAGGAUGCCAAACUCUGCCG | |
| | AGCCGGAGCUCAC | |
| R18080 | ACAGCUUAUUUGGAAGCUGAAAUGUGAGGUUUAUAACA | 672 |
| | CUCACAAGAAUCCUGAAAAAGGAUGCCAAACGCCGAGU | |
| | UGAGGCAGAGACU | |
| R18081 | ACAGCUUAUUUGGAAGCUGAAAUGUGAGGUUUAUAACA | 673 |
| | CUCACAAGAAUCCUGAAAAAGGAUGCCAAACUCAUCAA | |
| | UGAGGCCUGGUUC | |
| R18051 | ACAGCUUAUUUGGAAGCUGAAAUGUGAGGUUUAUAACA | 674 |
| | CUCACAAGAAUCCUGAAAAAGGAUGCCAAACUGGCCAU | |
| | CCGUGUAGGCCCC | |
| R18052 | ACAGCUUAUUUGGAAGCUGAAAUGUGAGGUUUAUAACA | 675 |
| | CUCACAAGAAUCCUGAAAAAGGAUGCCAAACGAGCAGC | |
| | UCAGCAGCUCCUC | |
| R18053 | ACAGCUUAUUUGGAAGCUGAAAUGUGAGGUUUAUAACA | 676 |
| | CUCACAAGAAUCCUGAAAAAGGAUGCCAAACCGCUCGC | |
| | CCCGCCGCUUCCC | |
| R18054 | ACAGCUUAUUUGGAAGCUGAAAUGUGAGGUUUAUAACA | 677 |
| | CUCACAAGAAUCCUGAAAAAGGAUGCCAAACGAGAAAC | |
| | UGGAGCAGCUCAG | |
| R18055 | ACAGCUUAUUUGGAAGCUGAAAUGUGAGGUUUAUAACA | 678 |
| | CUCACAAGAAUCCUGAAAAAGGAUGCCAAACGCCAUCC | |
| | GUGUAGGCCCCGA | |
| R18056 | ACAGCUUAUUUGGAAGCUGAAAUGUGAGGUUUAUAACA | 679 |
| | CUCACAAGAAUCCUGAAAAAGGAUGCCAAACUAGGCCC | |
| | CGAGUGUGCUGAC | |
| R18057 | ACAGCUUAUUUGGAAGCUGAAAUGUGAGGUUUAUAACA | 680 |
| | CUCACAAGAAUCCUGAAAAAGGAUGCCAAACGGCCCCG | |
| | AGUGUGCUGACCA | |
| R18058 | ACAGCUUAUUUGGAAGCUGAAAUGUGAGGUUUAUAACA | 681 |
| | CUCACAAGAAUCCUGAAAAAGGAUGCCAAACGGAAGCG | |
| | GCGGGGCGAGCGC | |
| R18059 | ACAGCUUAUUUGGAAGCUGAAAUGUGAGGUUUAUAACA | 682 |
| | CUCACAAGAAUCCUGAAAAAGGAUGCCAAACCUGAGCU | |
| | GCUCCAGUUUCUC | |
| R18060 | ACAGCUUAUUUGGAAGCUGAAAUGUGAGGUUUAUAACA | 683 |
| | CUCACAAGAAUCCUGAAAAAGGAUGCCAAACUGGUCAG | |
| | CACACUCGGGGCC | |
| R18061 | ACAGCUUAUUUGGAAGCUGAAAUGUGAGGUUUAUAACA | 684 |
| | CUCACAAGAAUCCUGAAAAAGGAUGCCAAACCUCCAGU | |
| | UUCUCCAGGAGUG | |
| R18062 | ACAGCUUAUUUGGAAGCUGAAAUGUGAGGUUUAUAACA | 685 |
| | CUCACAAGAAUCCUGAAAAAGGAUGCCAAACGCAGCUG | |
| | UUUUGCAGGACUG | |
| R18063 | ACAGCUUAUUUGGAAGCUGAAAUGUGAGGUUUAUAACA | 686 |
| | CUCACAAGAAUCCUGAAAAAGGAUGCCAAACAGGAGCU | |
| | GCUGAGCUGCUCC | |
| R18064 | ACAGCUUAUUUGGAAGCUGAAAUGUGAGGUUUAUAACA | 687 |
| | CUCACAAGAAUCCUGAAAAAGGAUGCCAAACAGCUGCU | |
| | CCAGUUUCUCCAG | |
| R18065 | ACAGCUUAUUUGGAAGCUGAAAUGUGAGGUUUAUAACA | 688 |
| | CUCACAAGAAUCCUGAAAAAGGAUGCCAAACGUCAGCA | |
| | CACUCGGGGCCUA | |
| R18034 | ACAGCUUAUUUGGAAGCUGAAAUGUGAGGUUUAUAACA | 689 |
| | CUCACAAGAAUCCUGAAAAAGGAUGCCAAACGAGCUGU | |
| | GUGGACGCUGCAG | |
| R18035 | ACAGCUUAUUUGGAAGCUGAAAUGUGAGGUUUAUAACA | 690 |
| | CUCACAAGAAUCCUGAAAAAGGAUGCCAAACGCAGUGG | |
| | ACACGGGUCCCCA | |
| R18036 | ACAGCUUAUUUGGAAGCUGAAAUGUGAGGUUUAUAACA | 691 |
| | CUCACAAGAAUCCUGAAAAAGGAUGCCAAACGCGUAGA | |
| | CACCCUCACCCCC | |
| R18037 | ACAGCUUAUUUGGAAGCUGAAAUGUGAGGUUUAUAACA | 692 |
| | CUCACAAGAAUCCUGAAAAAGGAUGCCAAACGACACCC | |
| | UCACCCCCAAAAG | |
| R18038 | ACAGCUUAUUUGGAAGCUGAAAUGUGAGGUUUAUAACA | 693 |
| | CUCACAAGAAUCCUGAAAAAGGAUGCCAAACGACACGG | |
| | GUCCCCAUGCUGG | |
| R18039 | ACAGCUUAUUUGGAAGCUGAAAUGUGAGGUUUAUAACA | 694 |
| | CUCACAAGAAUCCUGAAAAAGGAUGCCAAACGGGUAGC | |
| | AGGCAGCACCUGG | |
| R18040 | ACAGCUUAUUUGGAAGCUGAAAUGUGAGGUUUAUAACA | 695 |
| | CUCACAAGAAUCCUGAAAAAGGAUGCCAAACGCAGGCA | |
| | GCACCUGGCAAUG | |
| R18041 | ACAGCUUAUUUGGAAGCUGAAAUGUGAGGUUUAUAACA | 696 |
| | CUCACAAGAAUCCUGAAAAAGGAUGCCAAACGUGGAGC | |
| | UGUGUGGACGCUG | |
| R18042 | ACAGCUUAUUUGGAAGCUGAAAUGUGAGGUUUAUAACA | 697 |
| | CUCACAAGAAUCCUGAAAAAGGAUGCCAAACGCAAUGG | |
| | CGUAGACACCCUC | |
| R18043 | ACAGCUUAUUUGGAAGCUGAAAUGUGAGGUUUAUAACA | 698 |
| | CUCACAAGAAUCCUGAAAAAGGAUGCCAAACCCAGGUG | |
| | CUGCCUGCUACCC | |
| R18044 | ACAGCUUAUUUGGAAGCUGAAAUGUGAGGUUUAUAACA | 699 |
| | CUCACAAGAAUCCUGAAAAAGGAUGCCAAACGGGGUGA | |
| | GGGUGUCUACGCC | |
| R18045 | ACAGCUUAUUUGGAAGCUGAAAUGUGAGGUUUAUAACA | 700 |
| | CUCACAAGAAUCCUGAAAAAGGAUGCCAAACCGCCAUU | |
| | GCCAGGUGCUGCC | |
| R18046 | ACAGCUUAUUUGGAAGCUGAAAUGUGAGGUUUAUAACA | 701 |
| | CUCACAAGAAUCCUGAAAAAGGAUGCCAAACAGGGUGU | |
| | CUACGCCAUUGCC | |
| R18047 | ACAGCUUAUUUGGAAGCUGAAAUGUGAGGUUUAUAACA | 702 |
| | CUCACAAGAAUCCUGAAAAAGGAUGCCAAACUCUACGC | |
| | CAUUGCCAGGUGC | |
| R18048 | ACAGCUUAUUUGGAAGCUGAAAUGUGAGGUUUAUAACA | 703 |
| | CUCACAAGAAUCCUGAAAAAGGAUGCCAAACCCGGGCC | |
| | CACAACGCUUUUG | |
| R18049 | ACAGCUUAUUUGGAAGCUGAAAUGUGAGGUUUAUAACA | 704 |
| | CUCACAAGAAUCCUGAAAAAGGAUGCCAAACCAGCGUC | |
| | CACACAGCUCCAC | |
| R18050 | ACAGCUUAUUUGGAAGCUGAAAUGUGAGGUUUAUAACA | 705 |
| | CUCACAAGAAUCCUGAAAAAGGAUGCCAAACGGGACCC | |
| | GUGUCCACUGCCA | |
| R18008 | ACAGCUUAUUUGGAAGCUGAAAUGUGAGGUUUAUAACA | 706 |
| | CUCACAAGAAUCCUGAAAAAGGAUGCCAAACUGGGUGC | |
| | CAAGGUCCUCCAC | |
| R18009 | ACAGCUUAUUUGGAAGCUGAAAUGUGAGGUUUAUAACA | 707 |
| | CUCACAAGAAUCCUGAAAAAGGAUGCCAAACCCAAGGU | |
| | CCUCCACCUCCCA | |
| R18010 | ACAGCUUAUUUGGAAGCUGAAAUGUGAGGUUUAUAACA | 708 |
| | CUCACAAGAAUCCUGAAAAAGGAUGCCAAACACUUUGC | |
| | AUUCCAGACCUGG | |
| R18011 | ACAGCUUAUUUGGAAGCUGAAAUGUGAGGUUUAUAACA | 709 |
| | CUCACAAGAAUCCUGAAAAAGGAUGCCAAACGCAGCAG | |
| | GAAGCGUGGAUGC | |
| R18012 | ACAGCUUAUUUGGAAGCUGAAAUGUGAGGUUUAUAACA | 710 |
| | CUCACAAGAAUCCUGAAAAAGGAUGCCAAACGGCUGAC | |
| | CUCGUGGCCUCAG | |
| R18013 | ACAGCUUAUUUGGAAGCUGAAAUGUGAGGUUUAUAACA | 711 |
| | CUCACAAGAAUCCUGAAAAAGGAUGCCAAACGCCUCAG | |
| | CACAGGCGGCUUG | |
| R18014 | ACAGCUUAUUUGGAAGCUGAAAUGUGAGGUUUAUAACA | 712 |
| | CUCACAAGAAUCCUGAAAAAGGAUGCCAAACACCUCGU | |
| | GGCCUCAGCACAG | |
| R18015 | ACAGCUUAUUUGGAAGCUGAAAUGUGAGGUUUAUAACA | 713 |
| | CUCACAAGAAUCCUGAAAAAGGAUGCCAAACCUCCUUG | |
| | ACUUUGCAUUCCA | |
| R18016 | ACAGCUUAUUUGGAAGCUGAAAUGUGAGGUUUAUAACA | 714 |
| | CUCACAAGAAUCCUGAAAAAGGAUGCCAAACCAUUCCA | |
| | GACCUGGGGCAUG | |
| R18017 | ACAGCUUAUUUGGAAGCUGAAAUGUGAGGUUUAUAACA | 715 |
| | CUCACAAGAAUCCUGAAAAAGGAUGCCAAACGGUGCCA | |
| | AGGUCCUCCACCU | |
| R18018 | ACAGCUUAUUUGGAAGCUGAAAUGUGAGGUUUAUAACA | 716 |
| | CUCACAAGAAUCCUGAAAAAGGAUGCCAAACGUUGGGC | |
| | UGACCUCGUGGCC | |
| R18019 | ACAGCUUAUUUGGAAGCUGAAAUGUGAGGUUUAUAACA | 717 |
| | CUCACAAGAAUCCUGAAAAAGGAUGCCAAACGGGCAUG | |
| | GCAGCAGGAAGCG | |
| R18020 | ACAGCUUAUUUGGAAGCUGAAAUGUGAGGUUUAUAACA | 718 |
| | CUCACAAGAAUCCUGAAAAAGGAUGCCAAACAGGGGCC | |
| | GGGAUUCCAUGCU | |
| R18021 | ACAGCUUAUUUGGAAGCUGAAAUGUGAGGUUUAUAACA | 719 |
| | CUCACAAGAAUCCUGAAAAAGGAUGCCAAACUGCUGAG | |
| | GCCACGAGGUCAG | |
| R18022 | ACAGCUUAUUUGGAAGCUGAAAUGUGAGGUUUAUAACA | 720 |
| | CUCACAAGAAUCCUGAAAAAGGAUGCCAAACGCACCCA | |
| | CAAGCCGCCUGUG | |
| R18023 | ACAGCUUAUUUGGAAGCUGAAAUGUGAGGUUUAUAACA | 721 |
| | CUCACAAGAAUCCUGAAAAAGGAUGCCAAACCCCCAGG | |
| | UCUGGAAUGCAAA | |
| R18024 | ACAGCUUAUUUGGAAGCUGAAAUGUGAGGUUUAUAACA | 722 |
| | CUCACAAGAAUCCUGAAAAAGGAUGCCAAACGAGGACC | |
| | UUGGCACCCACAA | |
| R18025 | ACAGCUUAUUUGGAAGCUGAAAUGUGAGGUUUAUAACA | 723 |
| | CUCACAAGAAUCCUGAAAAAGGAUGCCAAACCUGAGGC | |
| | CACGAGGUCAGCC | |
| R18026 | ACAGCUUAUUUGGAAGCUGAAAUGUGAGGUUUAUAACA | 724 |
| | CUCACAAGAAUCCUGAAAAAGGAUGCCAAACGAAUGCA | |
| | AAGUCAAGGAGCA | |
| R18027 | ACAGCUUAUUUGGAAGCUGAAAUGUGAGGUUUAUAACA | 725 |
| | CUCACAAGAAUCCUGAAAAAGGAUGCCAAACCCAUGCC | |
| | CCAGGUCUGGAAU | |
| R18028 | ACAGCUUAUUUGGAAGCUGAAAUGUGAGGUUUAUAACA | 726 |
| | CUCACAAGAAUCCUGAAAAAGGAUGCCAAACCUGCCAU | |
| | GCCCCAGGUCUGG | |
| R18029 | ACAGCUUAUUUGGAAGCUGAAAUGUGAGGUUUAUAACA | 727 |
| | CUCACAAGAAUCCUGAAAAAGGAUGCCAAACGGAGGUG | |
| | GAGGACCUUGGCA | |
| R18030 | ACAGCUUAUUUGGAAGCUGAAAUGUGAGGUUUAUAACA | 728 |
| | CUCACAAGAAUCCUGAAAAAGGAUGCCAAACAGGCCAC | |
| | GAGGUCAGCCCAA | |
| R18031 | ACAGCUUAUUUGGAAGCUGAAAUGUGAGGUUUAUAACA | 729 |
| | CUCACAAGAAUCCUGAAAAAGGAUGCCAAACCAAAGUC | |
| | AAGGAGCAUGGAA | |
| R18032 | ACAGCUUAUUUGGAAGCUGAAAUGUGAGGUUUAUAACA | 730 |
| | CUCACAAGAAUCCUGAAAAAGGAUGCCAAACCAGCUCC | |
| | CACUGGGAGGUGG | |
| R18033 | ACAGCUUAUUUGGAAGCUGAAAUGUGAGGUUUAUAACA | 731 |
| | CUCACAAGAAUCCUGAAAAAGGAUGCCAAACGAAUCCC | |
| | GGCCCCUCAGGAG | |
| R17967 | ACAGCUUAUUUGGAAGCUGAAAUGUGAGGUUUAUAACA | 732 |
| | CUCACAAGAAUCCUGAAAAAGGAUGCCAAACGCUGUAA | |
| | AAAGGCAACAGAG | |
| R17968 | ACAGCUUAUUUGGAAGCUGAAAUGUGAGGUUUAUAACA | 733 |
| | CUCACAAGAAUCCUGAAAAAGGAUGCCAAACCAAAAGC | |
| | AAAACAGGUCUAG | |
| R17969 | ACAGCUUAUUUGGAAGCUGAAAUGUGAGGUUUAUAACA | 734 |
| | CUCACAAGAAUCCUGAAAAAGGAUGCCAAACAAUGUCU | |
| | GCUUGCUUGGGUG | |
| R17970 | ACAGCUUAUUUGGAAGCUGAAAUGUGAGGUUUAUAACA | 735 |
| | CUCACAAGAAUCCUGAAAAAGGAUGCCAAACAAAAUGC | |
| | UACAAAACCCAGA | |
| R17971 | ACAGCUUAUUUGGAAGCUGAAAUGUGAGGUUUAUAACA | 736 |
| | CUCACAAGAAUCCUGAAAAAGGAUGCCAAACCUUGCUU | |
| | GGGUGGGGCUGGU | |
| R17972 | ACAGCUUAUUUGGAAGCUGAAAUGUGAGGUUUAUAACA | 737 |
| | CUCACAAGAAUCCUGAAAAAGGAUGCCAAACCUACAAA | |
| | ACCCAGAAUAAAU | |
| R17973 | ACAGCUUAUUUGGAAGCUGAAAUGUGAGGUUUAUAACA | 738 |
| | CUCACAAGAAUCCUGAAAAAGGAUGCCAAACUCUGCUU | |
| | GCUUGGGUGGGGC | |
| R17974 | ACAGCUUAUUUGGAAGCUGAAAUGUGAGGUUUAUAACA | 739 |
| | CUCACAAGAAUCCUGAAAAAGGAUGCCAAACGGUGGGG | |
| | CUGGUGCUCAAGG | |
| R17975 | ACAGCUUAUUUGGAAGCUGAAAUGUGAGGUUUAUAACA | 740 |
| | CUCACAAGAAUCCUGAAAAAGGAUGCCAAACAAAAGGC | |
| | AACAGAGAGGACA | |
| R17976 | ACAGCUUAUUUGGAAGCUGAAAUGUGAGGUUUAUAACA | 741 |
| | CUCACAAGAAUCCUGAAAAAGGAUGCCAAACAUAAAAA | |
| | UGCUACAAAACCC | |
| R17977 | ACAGCUUAUUUGGAAGCUGAAAUGUGAGGUUUAUAACA | 742 |
| | CUCACAAGAAUCCUGAAAAAGGAUGCCAAACGUCUGUG | |
| | UUCCCCUUCCCAG | |
| R17978 | ACAGCUUAUUUGGAAGCUGAAAUGUGAGGUUUAUAACA | 743 |
| | CUCACAAGAAUCCUGAAAAAGGAUGCCAAACUUCCCCU | |
| | UCCCAGCCUCACU | |
| R17979 | ACAGCUUAUUUGGAAGCUGAAAUGUGAGGUUUAUAACA | 744 |
| | CUCACAAGAAUCCUGAAAAAGGAUGCCAAACUAAAAAG | |
| | GCAACAGAGAGGA | |
| R17980 | ACAGCUUAUUUGGAAGCUGAAAUGUGAGGUUUAUAACA | 745 |
| | CUCACAAGAAUCCUGAAAAAGGAUGCCAAACUCUUCAA | |
| | GUUACAAAAGCAA | |
| R17981 | ACAGCUUAUUUGGAAGCUGAAAUGUGAGGUUUAUAACA | 746 |
| | CUCACAAGAAUCCUGAAAAAGGAUGCCAAACGUGCUCA | |
| | AGGAGGGACAGUU | |
| R17982 | ACAGCUUAUUUGGAAGCUGAAAUGUGAGGUUUAUAACA | 747 |
| | CUCACAAGAAUCCUGAAAAAGGAUGCCAAACGGGCUGG | |
| | UGCUCAAGGAGGG | |
| R17983 | ACAGCUUAUUUGGAAGCUGAAAUGUGAGGUUUAUAACA | 748 |
| | CUCACAAGAAUCCUGAAAAAGGAUGCCAAACCUUGGGU | |
| | GGGGCUGGUGCUC | |
| R17984 | ACAGCUUAUUUGGAAGCUGAAAUGUGAGGUUUAUAACA | 749 |
| | CUCACAAGAAUCCUGAAAAAGGAUGCCAAACCAAAACC | |
| | CAGAAUAAAUAUC | |
| R17985 | ACAGCUUAUUUGGAAGCUGAAAUGUGAGGUUUAUAACA | 750 |
| | CUCACAAGAAUCCUGAAAAAGGAUGCCAAACUGUUCCC | |
| | CUUCCCAGCCUCA | |
| R17986 | ACAGCUUAUUUGGAAGCUGAAAUGUGAGGUUUAUAACA | 751 |
| | CUCACAAGAAUCCUGAAAAAGGAUGCCAAACGACCUGU | |
| | UUUGCUUUUGUAA | |
| R17987 | ACAGCUUAUUUGGAAGCUGAAAUGUGAGGUUUAUAACA | 752 |
| | CUCACAAGAAUCCUGAAAAAGGAUGCCAAACCUUUUGU | |
| | AACUUGAAGAUAU | |
| R17988 | ACAGCUUAUUUGGAAGCUGAAAUGUGAGGUUUAUAACA | 753 |
| | CUCACAAGAAUCCUGAAAAAGGAUGCCAAACUCCUCUC | |
| | UGUUGCCUUUUUA | |
| R17989 | ACAGCUUAUUUGGAAGCUGAAAUGUGAGGUUUAUAACA | 754 |
| | CUCACAAGAAUCCUGAAAAAGGAUGCCAAACGGUCUGU | |
| | CCUCUCUGUUGCC | |
| R17990 | ACAGCUUAUUUGGAAGCUGAAAUGUGAGGUUUAUAACA | 755 |
| | CUCACAAGAAUCCUGAAAAAGGAUGCCAAACUUCUGGG | |
| | UUUUGUAGCAUUU | |
| R17991 | ACAGCUUAUUUGGAAGCUGAAAUGUGAGGUUUAUAACA | 756 |
| | CUCACAAGAAUCCUGAAAAAGGAUGCCAAACUCCCUCC | |
| | UUGAGCACCAGCC | |
| R17992 | ACAGCUUAUUUGGAAGCUGAAAUGUGAGGUUUAUAACA | 757 |
| | CUCACAAGAAUCCUGAAAAAGGAUGCCAAACAAGAUAU | |
| | UUAUUCUGGGUUU | |
| R17993 | ACAGCUUAUUUGGAAGCUGAAAUGUGAGGUUUAUAACA | 758 |
| | CUCACAAGAAUCCUGAAAAAGGAUGCCAAACUUUAUUC | |
| | UGGGUUUUGUAGC | |
| R17994 | ACAGCUUAUUUGGAAGCUGAAAUGUGAGGUUUAUAACA | 759 |
| | CUCACAAGAAUCCUGAAAAAGGAUGCCAAACACUUGAA | |
| | GAUAUUUAUUCUG | |
| R17995 | ACAGCUUAUUUGGAAGCUGAAAUGUGAGGUUUAUAACA | 760 |
| | CUCACAAGAAUCCUGAAAAAGGAUGCCAAACAGGCUGG | |
| | GAAGGGGAACACA | |
| R17996 | ACAGCUUAUUUGGAAGCUGAAAUGUGAGGUUUAUAACA | 761 |
| | CUCACAAGAAUCCUGAAAAAGGAUGCCAAACUCUUUUG | |
| | GGUCUGUCCUCUC | |
| R17997 | ACAGCUUAUUUGGAAGCUGAAAUGUGAGGUUUAUAACA | 762 |
| | CUCACAAGAAUCCUGAAAAAGGAUGCCAAACUUUUGCU | |
| | UUUGUAACUUGAA | |
| R17998 | ACAGCUUAUUUGGAAGCUGAAAUGUGAGGUUUAUAACA | 763 |
| | CUCACAAGAAUCCUGAAAAAGGAUGCCAAACGGUUUUG | |
| | UAGCAUUUUUAUU | |
| R17999 | ACAGCUUAUUUGGAAGCUGAAAUGUGAGGUUUAUAACA | 764 |
| | CUCACAAGAAUCCUGAAAAAGGAUGCCAAACAGCACCA | |
| | GCCCCACCCAAGC | |
| R18000 | ACAGCUUAUUUGGAAGCUGAAAUGUGAGGUUUAUAACA | 765 |
| | CUCACAAGAAUCCUGAAAAAGGAUGCCAAACGGAAGGG | |
| | GAACACAGACCAG | |
| R18001 | ACAGCUUAUUUGGAAGCUGAAAUGUGAGGUUUAUAACA | 766 |
| | CUCACAAGAAUCCUGAAAAAGGAUGCCAAACCCGGCUC | |
| | CGGCAGCAGAUGG | |
| R18002 | ACAGCUUAUUUGGAAGCUGAAAUGUGAGGUUUAUAACA | 767 |
| | CUCACAAGAAUCCUGAAAAAGGAUGCCAAACGGAGGUC | |
| | CCAGGGAGGGCAC | |
| R18003 | ACAGCUUAUUUGGAAGCUGAAAUGUGAGGUUUAUAACA | 768 |
| | CUCACAAGAAUCCUGAAAAAGGAUGCCAAACGGAUGGG | |
| | GCUGUCACUGGAG | |
| R18004 | ACAGCUUAUUUGGAAGCUGAAAUGUGAGGUUUAUAACA | 769 |
| | CUCACAAGAAUCCUGAAAAAGGAUGCCAAACCAGUGCC | |
| | CUCCCUGGGACCU | |
| R18005 | ACAGCUUAUUUGGAAGCUGAAAUGUGAGGUUUAUAACA | 770 |
| | CUCACAAGAAUCCUGAAAAAGGAUGCCAAACCCAUCUG | |
| | CUGCCGGAGCCGG | |
| R18006 | ACAGCUUAUUUGGAAGCUGAAAUGUGAGGUUUAUAACA | 771 |
| | CUCACAAGAAUCCUGAAAAAGGAUGCCAAACACAGCCC | |
| | CAUCCCAGGAUGG | |
| R18007 | ACAGCUUAUUUGGAAGCUGAAAUGUGAGGUUUAUAACA | 772 |
| | CUCACAAGAAUCCUGAAAAAGGAUGCCAAACCUGCCGG | |
| | AGCCGGCACCUGG | |
| n/a | ACAGCUUAUUUGGAAGCUGAAAUGUGAGGUUUAUAACA | 829 |
| | CUCACAAGAAUCCUGAAAAAGGAUGCCAAACUAGAACC | |
| | UUGAUGACAUAGC | |
| PL34563 | ACAGCUUAUUUGGAAGCUGAAAUGUGAGGUUUAUAACA | 2027 |
| | CUCACAAGAAUCCUGAAAAAGGAUGCCAAACCUUACUU | |
| | UAAGUGAAGUUAC | |
| PL34564 | ACAGCUUAUUUGGAAGCUGAAAUGUGAGGUUUAUAACA | 2028 |
| | CUCACAAGAAUCCUGAAAAAGGAUGCCAAACUUUUCUA | |
| | CUUACUUUAAGUG | |
| PL34565 | ACAGCUUAUUUGGAAGCUGAAAUGUGAGGUUUAUAACA | 2029 |
| | CUCACAAGAAUCCUGAAAAAGGAUGCCAAACUCCAGAC | |
| | UUUUGUAGAAAAA | |
| PL34566 | ACAGCUUAUUUGGAAGCUGAAAUGUGAGGUUUAUAACA | 2030 |
| | CUCACAAGAAUCCUGAAAAAGGAUGCCAAACAAAUACU | |
| | GACUUACCUGAUU | |
| PL34567 | ACAGCUUAUUUGGAAGCUGAAAUGUGAGGUUUAUAACA | 2031 |
| | CUCACAAGAAUCCUGAAAAAGGAUGCCAAACUCAGCUC | |
| | AGAAGGACUAGUA | |
| PL34568 | ACAGCUUAUUUGGAAGCUGAAAUGUGAGGUUUAUAACA | 2032 |
| | CUCACAAGAAUCCUGAAAAAGGAUGCCAAACUCUUACC | |
| | AUCAUGUUUUACA | |
| PL34569 | ACAGCUUAUUUGGAAGCUGAAAUGUGAGGUUUAUAACA | 2033 |
| | CUCACAAGAAUCCUGAAAAAGGAUGCCAAACUUGAUUC | |
| | UAGGCAUUCCUGC | |
| PL34570 | ACAGCUUAUUUGGAAGCUGAAAUGUGAGGUUUAUAACA | 2034 |
| | CUCACAAGAAUCCUGAAAAAGGAUGCCAAACUUCAGGU | |
| | AGUCCAUGGACAU | |
| PL34571 | ACAGCUUAUUUGGAAGCUGAAAUGUGAGGUUUAUAACA | 2035 |
| | CUCACAAGAAUCCUGAAAAAGGAUGCCAAACGUCCCCU | |
| | UACCAUCAAGCCU | |
| PL34572 | ACAGCUUAUUUGGAAGCUGAAAUGUGAGGUUUAUAACA | 2036 |
| | CUCACAAGAAUCCUGAAAAAGGAUGCCAAACAAACUUU | |
| | UCUUUUCAGGAGA | |
| PL34573 | ACAGCUUAUUUGGAAGCUGAAAUGUGAGGUUUAUAACA | 2037 |
| | CUCACAAGAAUCCUGAAAAAGGAUGCCAAACUCAGAAA | |
| | AAGAUACCUGAAU | |
| PL34574 | ACAGCUUAUUUGGAAGCUGAAAUGUGAGGUUUAUAACA | 2038 |
| | CUCACAAGAAUCCUGAAAAAGGAUGCCAAACUCUCCUU | |
| | UAGGAGGCUGGUG | |
| PL34575 | ACAGCUUAUUUGGAAGCUGAAAUGUGAGGUUUAUAACA | 2039 |
| | CUCACAAGAAUCCUGAAAAAGGAUGCCAAACUCUUGUU | |
| | UUUCUACAAAAGU | |
| PL34576 | ACAGCUUAUUUGGAAGCUGAAAUGUGAGGUUUAUAACA | 2040 |
| | CUCACAAGAAUCCUGAAAAAGGAUGCCAAACAAAGAAA | |
| | UAGAAAAUCAGGU | |
| PL34577 | ACAGCUUAUUUGGAAGCUGAAAUGUGAGGUUUAUAACA | 2041 |
| | CUCACAAGAAUCCUGAAAAAGGAUGCCAAACAAUACUA | |
| | GUCCUUCUGAGCU | |
| PL34578 | ACAGCUUAUUUGGAAGCUGAAAUGUGAGGUUUAUAACA | 2042 |
| | CUCACAAGAAUCCUGAAAAAGGAUGCCAAACAGAAAUG | |
| | UAAAACAUGAUGG | |
| PL34579 | ACAGCUUAUUUGGAAGCUGAAAUGUGAGGUUUAUAACA | 2043 |
| | CUCACAAGAAUCCUGAAAAAGGAUGCCAAACCAUUCAG | |
| | CAGGAAUGCCUAG | |
| PL34580 | ACAGCUUAUUUGGAAGCUGAAAUGUGAGGUUUAUAACA | 2044 |
| | CUCACAAGAAUCCUGAAAAAGGAUGCCAAACGUGGUAC | |
| | AUUCAGCAGGAAU | |
| PL34581 | ACAGCUUAUUUGGAAGCUGAAAUGUGAGGUUUAUAACA | 2045 |
| | CUCACAAGAAUCCUGAAAAAGGAUGCCAAACAAUUAAU | |
| | GUCCAUGGACUAC | |
| PL34582 | ACAGCUUAUUUGGAAGCUGAAAUGUGAGGUUUAUAACA | 2046 |
| | CUCACAAGAAUCCUGAAAAAGGAUGCCAAACGUUUUGG | |
| | GAGGCUUGAUGGU | |
| PL34583 | ACAGCUUAUUUGGAAGCUGAAAUGUGAGGUUUAUAACA | 2047 |
| | CUCACAAGAAUCCUGAAAAAGGAUGCCAAACGGCCCAA | |
| | CCAAAAUUCUCCU | |
| PL34584 | ACAGCUUAUUUGGAAGCUGAAAUGUGAGGUUUAUAACA | 2048 |
| | CUCACAAGAAUCCUGAAAAAGGAUGCCAAACUCCAGAG | |
| | GGUUAUUCAGGUA | |
| PL34585 | ACAGCUUAUUUGGAAGCUGAAAUGUGAGGUUUAUAACA | 2049 |
| | CUCACAAGAAUCCUGAAAAAGGAUGCCAAACCUUACGG | |
| | GCAGAGGCCAGGA | |
| PL34586 | ACAGCUUAUUUGGAAGCUGAAAUGUGAGGUUUAUAACA | 2050 |
| | CUCACAAGAAUCCUGAAAAAGGAUGCCAAACCUCUUUC | |
| | CUCAGGAGCUUCA | |
| PL34587 | ACAGCUUAUUUGGAAGCUGAAAUGUGAGGUUUAUAACA | 2051 |
| | CUCACAAGAAUCCUGAAAAAGGAUGCCAAACAUUUAGG | |
| | GGCUGGGUGACCG | |
| PL34588 | ACAGCUUAUUUGGAAGCUGAAAUGUGAGGUUUAUAACA | 2052 |
| | CUCACAAGAAUCCUGAAAAAGGAUGCCAAACACUGAUU | |
| | UAGGGGCUGGGUG | |

TABLE 13
Exemplary Guide Nucleic Acids Targeting
ANGPTL3 for CasM.265466 Effector Proteins

| | | SEQ |
|---|---|---|
| Guide | Guide sequence (shown as RNA), | ID |
| ID | 5′-3′ | NO: |
| PL34532 | ACAGCUUAUUUGGAAGCUGAAAUGUGAGGU | 2053 |
| | UUAUAACACUCACAAGAAUCCUGAAAAAGG | |
| | AUGCCAAACCUUCCCCUGACUGAUUUAGG | |
| PL34533 | ACAGCUUAUUUGGAAGCUGAAAUGUGAGGU | 2054 |
| | UUAUAACACUCACAAGAAUCCUGAAAAAGG | |
| | AUGCCAAACGAGGCAGCUGCUCCAGGUAA | |
| PL34534 | ACAGCUUAUUUGGAAGCUGAAAUGUGAGGU | 2055 |
| | UUAUAACACUCACAAGAAUCCUGAAAAAGG | |
| | AUGCCAAACCAUGGCACCUCUGUUCCUGC | |
| PL34535 | ACAGCUUAUUUGGAAGCUGAAAUGUGAGGU | 2056 |
| | UUAUAACACUCACAAGAAUCCUGAAAAAGG | |
| | AUGCCAAACGCGCUCCUGGCCUCUGCCCG | |
| PL34536 | ACAGCUUAUUUGGAAGCUGAAAUGUGAGGU | 2057 |
| | UUAUAACACUCACAAGAAUCCUGAAAAAGG | |
| | AUGCCAAACAAGCCAUCGGUCACCCAGCC | |
| PL34537 | ACAGCUUAUUUGGAAGCUGAAAUGUGAGGU | 2058 |
| | UUAUAACACUCACAAGAAUCCUGAAAAAGG | |
| | AUGCCAAACCACCCGCACCUUGGCGCAGC | |
| PL34538 | ACAGCUUAUUUGGAAGCUGAAAUGUGAGGU | 2059 |
| | UUAUAACACUCACAAGAAUCCUGAAAAAGG | |
| | AUGCCAAACGGGCCAGGAUCCGUGGAGGU | |
| PL34539 | ACAGCUUAUUUGGAAGCUGAAAUGUGAGGU | 2060 |
| | UUAUAACACUCACAAGAAUCCUGAAAAAGG | |
| | AUGCCAAACGCUCACCAGCUCCAGCAGGU | |
| PL34540 | ACAGCUUAUUUGGAAGCUGAAAUGUGAGGU | 2061 |
| | UUAUAACACUCACAAGAAUCCUGAAAAAGG | |
| | AUGCCAAACGCUUCUGCAGGCCUUGAAGU | |
| PL34541 | ACAGCUUAUUUGGAAGCUGAAAUGUGAGGU | 2062 |
| | UUAUAACACUCACAAGAAUCCUGAAAAAGG | |
| | AUGCCAAACGGGGUCUUACCGGGGGGCUG | |
| PL34542 | ACAGCUUAUUUGGAAGCUGAAAUGUGAGGU | 2063 |
| | UUAUAACACUCACAAGAAUCCUGAAAAAGG | |
| | AUGCCAAACGAAAGACGGAGGCAGCCUGG | |
| PL34543 | ACAGCUUAUUUGGAAGCUGAAAUGUGAGGU | 2064 |
| | UUAUAACACUCACAAGAAUCCUGAAAAAGG | |
| | AUGCCAAACCUUACCUGUCUGUGGAAGCG | |
| PL34544 | ACAGCUUAUUUGGAAGCUGAAAUGUGAGGU | 2065 |
| | UUAUAACACUCACAAGAAUCCUGAAAAAGG | |
| | AUGCCAAACUUCGUCGAGCAGGCCAGCAA | |
| PL34545 | ACAGCUUAUUUGGAAGCUGAAAUGUGAGGU | 2066 |
| | UUAUAACACUCACAAGAAUCCUGAAAAAGG | |
| | AUGCCAAACGGGCCAUCACUUACCUAUGA | |
| PL34546 | ACAGCUUAUUUGGAAGCUGAAAUGUGAGGU | 2067 |
| | UUAUAACACUCACAAGAAUCCUGAAAAAGG | |
| | AUGCCAAACUUCCUCCCAGGCCUGGAGUU | |
| PL34547 | ACAGCUUAUUUGGAAGCUGAAAUGUGAGGU | 2068 |
| | UUAUAACACUCACAAGAAUCCUGAAAAAGG | |
| | AUGCCAAACAUGACCUGGAAAGGUGAGGA | |
| PL34548 | ACAGCUUAUUUGGAAGCUGAAAUGUGAGGU | 2069 |
| | UUAUAACACUCACAAGAAUCCUGAAAAAGG | |
| | AUGCCAAACCACCAGGCAUUGCAGCCAUG | |
| PL34549 | ACAGCUUAUUUGGAAGCUGAAAUGUGAGGU | 2070 |
| | UUAUAACACUCACAAGAAUCCUGAAAAAGG | |
| | AUGCCAAACCUUACCUGCCCCAUGGGUGC | |
| PL34550 | ACAGCUUAUUUGGAAGCUGAAAUGUGAGGU | 2071 |
| | UUAUAACACUCACAAGAAUCCUGAAAAAGG | |
| | AUGCCAAACCAGUCACCUCCAUGCGCUCG | |
| PL34551 | ACAGCUUAUUUGGAAGCUGAAAUGUGAGGU | 2072 |
| | UUAUAACACUCACAAGAAUCCUGAAAAAGG | |
| | AUGCCAAACACUCUAAGGCCCAAGGGGGC | |
| PL34552 | ACAGCUUAUUUGGAAGCUGAAAUGUGAGGU | 2073 |
| | UUAUAACACUCACAAGAAUCCUGAAAAAGG | |
| | AUGCCAAACCCCCAGGCUGCAGCUCCCAC | |
| PL34553 | ACAGCUUAUUUGGAAGCUGAAAUGUGAGGU | 2074 |
| | UUAUAACACUCACAAGAAUCCUGAAAAAGG | |
| | AUGCCAAACGCAGGUGACCGUGGCCUGCG | |

[0179] In some embodiments, guide nucleic acids comprise a portion or all of a sequence as set forth in any one of TABLES 1, 7, or 8. In some embodiments, a guide nucleic acid comprises at least 9, at least 10, at least 11, at least 12 contiguous nucleotides of a sequence selected from any one of SEQ ID NOs: 1-31, 38-43, 67-78, 207, 491, 804-805, 815-816, 830-999, and 1400-1569. In some embodiments, the guide nucleic acid comprises at least 15, at least 20, at least 25, at least 30, or at least 35 contiguous nucleotides of a sequence selected from any one of SEQ ID NOs: 1-31, 38-43, 67-78, 207, 491, 804-805, 815-816, 830-999, and 1400-1569.

[0180] In some embodiments, guide nucleic acids comprise a portion or all of a sequence as set forth in any one of TABLES 3, 7, or 9. In some embodiments, a guide nucleic acid comprises at least 9, at least 10, at least 11, at least 12 contiguous nucleotides of a sequence selected from any one of SEQ ID NOs: 16, 38-43, 79-202, 208, 492-493, 799-803, 809-814, and 820. In some embodiments, the guide nucleic acid comprises at least 15, at least 20, at least 25, at least 30, or at least 35 contiguous nucleotides of a sequence selected from any one of SEQ ID NOs: 16, 38-43, 79-202, 208, 492-493, 799-803, 809-814, and 820.

[0181] In some embodiments, guide nucleic acids comprise a portion or all of a sequence as set forth in any one of TABLES 5, 7, or 10. In some embodiments, a guide nucleic acid comprises at least 9, at least 10, at least 11, at least 12 contiguous nucleotides of a sequence selected from any one of SEQ ID NOs: 16, 38-43, 806-808, and 817-819. In some embodiments, the guide nucleic acid comprises at least 15, at least 20, at least 25, at least 30, or at least 35 contiguous nucleotides of a sequence selected from any one of SEQ ID NOs: 16, 38-43, 806-808, and 817-819.

[0182] In some embodiments, compositions disclosed herein comprises a spacer sequence that is at least 70%, at least 75%, at least 80%, at least 85%, at least 90%, at least 95%, or 100% identical to any one of the sequences as set forth in TABLES 1, 3, and 5, and comprising a repeat sequence that is at least 70%, at least 75%, at least 80%, at least 85%, at least 90%, at least 95%, or 100% identical to a sequence selected from any one of SEQ ID NOs: 16 or 38-43.

[0183] In some embodiments, compositions disclosed herein comprises a guide nucleic acid sequence that is at least 70%, at least 75%, at least 80%, at least 85%, at least 90%, at least 95%, or 100% identical to any one of the sequences as set forth in TABLES 8-10.

[0184] In some embodiments, guide nucleic acids comprise a portion or all of a sequence as set forth in any one of TABLES 2, 7, or 11. In some embodiments, a guide nucleic acid comprises at least 40, at least 45, at least 50, at least 55, at least 60, at least 65, at least 70, at least 75, at least 80, at least 85, at least 86, at least 87, at least 88, or at least 89 contiguous nucleotides of a sequence selected from any one of SEQ ID NOs: 44, 209-299, 488-490, 494-584, 823-828, 1000-1399, 1570-1969, 2018-2026, and 2075-2089.

[0185] In some embodiments, guide nucleic acids comprise a portion or all of a sequence as set forth in any one of TABLES 4, 7, or 12. In some embodiments, a guide nucleic acid comprises at least 40, at least 45, at least 50, at least 55, at least 60, at least 65, at least 70, at least 75, at least 80, at least 85, at least 86, at least 87, at least 88, or at least 89 contiguous nucleotides of a sequence selected from any one of SEQ ID NOs: 44, 300-490, 585-772, 822, 829, 1970-1995, and 2027-2052.

[0186] In some embodiments, guide nucleic acids comprise a portion or all of a sequence as set forth in any one of TABLES 6, 7, or 13. In some embodiments, a guide nucleic acid at least 40, at least 45, at least 50, at least 55, at least 60, at least 65, at least 70, at least 75, at least 80, at least 85, at least 86, at least 87, at least 88, or at least 89 contiguous nucleotides of any one of SEQ ID NOs: 44, 488-490, 1996-2017, and 2053-2074.

[0187] In some embodiments, compositions, systems, and methods described herein comprise a disclosed herein comprises a spacer sequence that is at least 70%, at least 75%, at least 80%, at least 85%, at least 90%, at least 92%, at least 95%, at least 97%, at least 99%, or 100% identical to any one of the sequences as set forth in TABLES 2, 4, and 6, and comprising a repeat sequence that is at least 65%, at least 70%, at least 75%, at least 80%, at least 85%, at least 90%, at least 95%, or 100% identical to SEQ ID NO: 488.

[0188] In some embodiments, compositions disclosed herein comprises a guide nucleic acid sequence that is at least 70%, at least 75%, at least 80%, at least 85%, at least 90%, at least 95%, or 100% identical to any one of the sequences as set forth in TABLE 11-13.

[0189] In some embodiments, the sequences in any one of TABLES 1-13 and SEQ ID NOs: 44, and 489-490 can be modified.

[0190] In some embodiments, the modification includes at least one phosphorothioate (PS) linkage. In some embodiments, the modification includes at least one 2′-O-Methyl oligonucleotide (OMe). In some embodiments, the modification includes at least one locked nucleic acid (LNA). In some embodiments, the modification includes at least one Phosphorodiamidate morpholino oligonucleotide (PMO). In some embodiments, the modification includes at least one or more peptide nucleic acid (PNA). In some embodiments, the first 3 and last 3 amino acids are 0-Me modified, and the first 3 and last 2 linkages are phosphorothioate linkages. In some embodiments, the sequence is modified mN*mN*mN* . . . NNNmN*mN*mN where m is 2′-O-Me modified sugar moiety and the * denotes a PS linkage.

### Nucleic Acid Linkers

[0191] In some embodiments, a guide nucleic acid for use with compositions, systems, and methods described herein comprises one or more linkers, or a nucleic acid encoding one or more linkers. In some embodiments, the guide nucleic acid comprises at least one, at least two, at least three, at least four, at least five, at least six, at least seven, at least eight, at least nine, or at least ten linkers. In some embodiments, the guide nucleic acid comprises one, two, three, four, five, six, seven, eight, nine, or ten linkers. In some embodiments, the guide nucleic acid comprises two or more linkers. In some embodiments, at least two or more linkers are the same. In some embodiments, at least two or more linkers are not same.

[0192] In some embodiments, a linker comprises one to ten, one to seven, one to five, one to three, two to ten, two to eight, two to six, two to four, three to ten, three to seven, three to five, four to ten, four to eight, four to six, five to ten, five to seven, six to ten, six to eight, seven to ten, or eight to ten linked nucleotides. In some embodiments, the linker comprises one, two, three, four, five, six, seven, eight, nine, or ten linked nucleotides. In some embodiments, a linker comprises a nucleotide sequence of 5′-GAAA-3′ (SEQ ID NO: 44).

[0193] In some embodiments, a guide nucleic acid comprises one or more linkers connecting one or more repeat sequences. In some embodiments, the guide nucleic acid comprises one or more linkers connecting one or more repeat sequences and one or more spacer sequences. In some embodiments, the guide nucleic acid comprises at least two repeat sequences connected by a linker.

### 4. Effector Proteins

[0194] In some embodiments, compositions provided herein comprise one or more effector proteins or a nucleic acid encoding the same. In some embodiments, compositions and systems described herein comprise an effector protein that is similar to a naturally occurring effector protein. The effector protein may lack a portion of the naturally occurring effector protein. The effector protein may comprise a mutation relative to the naturally-occurring effector protein, wherein the mutation is not found in nature.

[0195] An effector protein may be brought into proximity of a target nucleic acid in the presence of a guide nucleic acid. The ability of an effector protein to modify a target nucleic acid may be dependent upon the effector protein being bound to a guide nucleic acid and the guide nucleic acid being hybridized to a target nucleic acid. An effector protein may also recognize a protospacer adjacent motif (PAM) sequence present in the target nucleic acid, which may direct the modification activity of the effector protein.

[0196] In some embodiments, the effector protein is a programmable nuclease (e.g., a CRISPR-associated (Cas) protein) that modifies a target sequence in a target nucleic acid. In some embodiments, the effector protein is a programmable nuclease that modifies a region of the nucleic acid that is near, but not within, to the target sequence. Effector proteins may cleave nucleic acids, including single stranded RNA (ssRNA), double stranded DNA (dsDNA), and single-stranded DNA (ssDNA). Effector proteins may provide cis cleavage activity, trans cleavage activity, nickase activity, or a combination thereof.

[0197] An effector protein may function as a single protein that is capable of binding to a guide nucleic acid and modifying a target nucleic acid. Alternatively, an effector protein may function as part of a multiprotein complex, including, for example, a complex having two or more effector proteins, including two or more of the same effector proteins (e.g., a dimer or a multimer). An effector protein, when functioning in a multiprotein complex, may have only one functional activity (e.g., binding to a guide nucleic acid), while other effector proteins present in the multiprotein complex are capable of another functional activity (e.g., modifying a target nucleic acid).

[0198] In some embodiments, the effector protein is a Type V Cas protein. In some embodiments, the effector protein is CasPhi.12 or a variant thereof. In some embodiments, the effector protein is CasM.265466 or a variant thereof. A CasPhi.12 is around half of the size of Cas9, and CasM.265466 is around one third of the size of Cas9. The smaller sizes of CasPhi.12 and CasM.265466 make them ideal to be packaged together with their corresponding guide RNAs into a single AAV vector, thus overcoming the drawbacks of dual AAV vector systems.

[0199] TABLE 15 provides illustrative amino acid sequences of effector proteins. In some embodiments, the amino acid sequence of an effector protein is at least 65%, at least 70%, at least 75%, at least 80%, at least 85%, at least 90%, at least 95%, at least 97%, or at least 98%, at least 99%, or 100% identical to the sequence as set forth in TABLE 15. In some embodiments, an effector protein comprises an amino acid sequence that is at least 65%, at least 70%, at least 75%, at least 80%, at least 85%, at least 90%, at least 95%, at least 97%, or at least 98%, at least 99%, or 100% identical to any one of the sequences as set forth in TABLE 15. In some embodiments, the effector protein consists of an amino acid sequence selected from the sequences as set forth in TABLE 15.

[0200] In some embodiments, compositions, systems, and methods comprise an effector protein or uses thereof, wherein the amino acid sequence of the effector protein comprises at least about 200, at least about 220, at least about 240, at least about 260, at least about 280, at least about 300, at least about 320, at least about 340, at least about 360, at least about 380, at least about 400, at least about 420, at least about 440, at least about 460, at least about 480, at least about 500, at least about 520, at least about 540, at least about 560, at least about 580, at least about 600, at least about 620, at least about 640, at least about 660, at least about 680, or at least about 700 contiguous amino acids of a sequence in TABLE 15.

[0201] In some embodiments, the effector protein may also comprise at least one additional amino acid relative to the naturally-occurring or wild type effector protein. For example, the effector protein may comprise an addition of a nuclear localization signal relative to the natural occurring effector protein. In some embodiments, compositions and systems described herein may comprise a nuclear localization signal (NLS). In some embodiments, the effector protein is linked to a nuclear localization signal. In some embodiments, compositions and systems described herein may comprise a NLS sequence that is adjacent to the N terminal of the effector protein or that is adjacent to the C terminal of the effector protein, or both. In some embodiments, a nuclear localization signal can comprise a sequence of -N-MAPKKKRKVGIHGVPAA-C (SEQ ID NO: 36). In some embodiments, a nuclear localization signal can comprise a sequence of -N-KRPAATKKAGQAKKKK-C (SEQ ID NO: 37). In certain embodiments, the nucleotide sequence encoding the effector protein is codon optimized (e.g., for expression in a eukaryotic cell) relative to the naturally occurring sequence.

[0202] TABLE 14 provides exemplary nuclear localization sequences. In TABLE 14, X is any naturally occurring amino acid, and \hat{ }D/E is any naturally occurring amino acid except Asp or Glu

TABLE 14
Exemplary Nuclear Localization Sequences

| SEQ | | |
|---|---|---|
| ID NO: | Description | Sequence |
| 47 | NLS | PKKKRKVGIHGVPAA |
| 48 | NLS | KRPAATKKAGQAKKKK |
| N/A | NLS | KR(K/R)R |
| N/A | NLS | (P/R)XXKR(^{∧}DE)(K/R) |
| 49 | NLS | KRX(W/F/Y)XXAF |
| N/A | NLS | (R/P)XXKR(K/R)(^{∧}DE) |
| 50 | NLS | LGKR(K/R)(W/F/Y) |
| N/A | NLS | KRX₁₀K(K/R)(K/R) |
| N/A | NLS | K(K/R)RK |
| N/A | NLS | KRX₁₁K(K/R)(K/R) |
| N/A | NLS | KRX₁₂K(K/R)(K/R) |
| N/A | NLS | KRX₁₀K(K/R)X(K/R) |
| N/A | NLS | KRX₁₁K(K/R)X(K/R) |
| N/A | NLS | KRX₁₂K(K/R)X(K/R) |
| 51 | NLS | APKKKRKVGIHGVPAA |
| 52 | EEP | GLFXALLXLLXSLWXLLLXA |
| 53 | EEP | GLFHALLHLLHSLWHLLLHA |

[0203] An effector protein may function as a single protein that is capable of binding to a guide nucleic acid and modifying a target nucleic acid. Alternatively, an effector protein may function as part of a multiprotein complex, including, for example, a complex having two or more effector proteins, including two or more of the same effector proteins (e.g., a dimer or a multimer). An effector protein, when functioning in a multiprotein complex, may have only one functional activity (e.g., binding to a guide nucleic acid), while other effector proteins present in the multiprotein complex are capable of another functional activity (e.g., modifying a target nucleic acid).

TABLE 15
Exemplary Effector Proteins

| Effector | | SEQ |
|---|---|---|
| Protein | Amino Acid Sequence | ID NO: |
| CasPhi.12 | MIKPTVSQFLTPGFKLIRNHSRTAGLKLKNEGEEACKKFVR | 32 |
| | ENEIPKDECPNFQGGPAIANIIAKSREFTEWEIYQSSLAIQEVI | |
| | FTLPKDKLPEPILKEEWRAQWLSEHGLDTVPYKEAAGLNLI | |
| | IKNAVNTYKGVQVKVDNKNKNNLAKINRKNEIAKLNGEQ | |
| | EISFEEIKAFDDKGYLLQKPSPNKSIYCYQSVSPKPFITSKYH | |
| | NVNLPEEYIGYYRKSNEPIVSPYQFDRLRIPIGEPGYVPKWQ | |
| | YTFLSKKENKRRKLSKRIKNVSPILGIICIKKDWCVFDMRGL | |
| | LRTNHWKKYHKPTDSINDLFDYFTGDPVIDTKANVVRFRY | |
| | KMENGIVNYKPVREKKGKELLENICDQNGSCKLATVDVG | |
| | QNNPVAIGLFELKKVNGELTKTLISRHPTPIDFCNKITAYRE | |
| | RYDKLESSIKLDAIKQLTSEQKIEVDNYNNNFTPQNTKQIVC | |
| | SKLNINPNDLPWDKMISGTHFISEKAQVSNKSEIYFTSTDKG | |
| | KTKDVMKSDYKWFQDYKPKLSKEVRDALSDIEWRLRRES | |
| | LEFNKLSKSREQDARQLANWISSMCDVIGIENLVKKNNFFG | |
| | GSGKREPGWDNFYKPKKENRWWINAIHKALTELSQNKGK | |
| | RVILLPAMRTSITCPKCKYCDSKNRNGEKFNCLKCGIELNA | |
| | DIDVATENLATVAITAQSMPKPTCERSGDAKKPVRARKAK | |
| | APEFHDKLAPSYTVVLREAV | |
| CasPhi.12 with | PKKKRKVGIHGVPAAMIKPTVSQFLTPGFKLIRNHSRTAGL | 33 |
| exemplary | KLKNEGEEACKKFVRENEIPKDECPNFQGGPAIANIIAKSRE | |
| NLS (bold, | FTEWEIYQSSLAIQEVIFTLPKDKLPEPILKEEWRAQWLSEH | |
| italicized) at N | GLDTVPYKEAAGLNLIIKNAVNTYKGVQVKVDNKNKNNL | |
| terminus and C | AKINRKNEIAKLNGEQEISFEEIKAFDDKGYLLQKPSPNKSI | |
| terminus | YCYQSVSPKPFITSKYHNVNLPEEYIGYYRKSNEPIVSPYQF | |
| | DRLRIPIGEPGYVPKWQYTFLSKKENKRRKLSKRIKNVSPIL | |
| | GIICIKKDWCVFDMRGLLRTNHWKKYHKPTDSINDLFDYF | |
| | TGDPVIDTKANVVRFRYKMENGIVNYKPVREKKGKELLEN | |
| | ICDQNGSCKLATVDVGQNNPVAIGLFELKKVNGELTKTLIS | |
| | RHPTPIDFCNKITAYRERYDKLESSIKLDAIKQLTSEQKIEVD | |
| | NYNNNFTPQNTKQIVCSKLNINPNDLPWDKMISGTHFISEK | |
| | AQVSNKSEIYFTSTDKGKTKDVMKSDYKWFQDYKPKLSK | |
| | EVRDALSDIEWRLRRESLEFNKLSKSREQDARQLANWISSM | |
| | CDVIGIENLVKKNNFFGGSGKREPGWDNFYKPKKENRWWI | |
| | NAIHKALTELSQNKGKRVILLPAMRTSITCPKCKYCDSKNR | |
| | NGEKFNCLKCGIELNADIDVATENLATVAITAQSMPKPTCE | |
| | RSGDAKKPVRARKAKAPEFHDKLAPSYTVVLREAVKRPAA | |
| | TKKAGQAKKKK | |
| CasM.265466 | MSVLTRKVQLIPVGDKEERDRVYKYLRDGIEAQNRAMNL | 773 |
| | YMSGLYFAAINEASKEDRKELNQLYSRIATSSKGSAYTTDI | |
| | EFPTGLASTSTLSMAVRQDFTKSLKDGLMYGRVSLPTYRK | |
| | DNPLFVDVRFVALRGTKQKYNGLYHEYKSHTEFLDNLYSS | |
| | DLKVYIKFANDITFQVIFGNPRKSSALRSEFQNIFEEYYKVC | |
| | QSSIQFSGTKIILNMAMDIPDKEIELDEDVCVGVDLGIAIPAV | |
| | CALNKNRYSRVSIGSKEDFLRVRTKIRNQRKRLQTNLKSSN | |
| | GGHGRKKKMKPMDRFRDYEANWVQNYNHYVSRQVVDF | |
| | AVKNKAKYINLENLEGIRDDVKNEWLLSNWSYYQLQQYIT | |
| | YKAKTYGIEVRKINPYHTSQRCSCCGYEDAGNRPKKEKGQ | |
| | AYFKCLKCGEEMNADFNAARNIAMSTEFQSGKKTKKQKK | |
| | EQHENK | |
| 3x Flag- | MDYKDHDGDYKDHDIDYKDDDDKMAPKKKRKVGIHGVP | 774 |
| SV40NLS- | AAMSVLTRKVQLIPVGDKEERDRVYKYLRDGIEAQNRAM | |
| CasM.265466- | NLYMSGLYFAAINEASKEDRKELNQLYSRIATSSKGSAYTT | |
| nucleoplasmin | DIEFPTGLASTSTLSMAVRQDFTKSLKDGLMYGRVSLPTYR | |
| NLS | KDNPLFVDVRFVALRGTKQKYNGLYHEYKSHTEFLDNLYS | |
| (Bold and | SDLKVYIKFANDITFQVIFGNPRKSSALRSEFQNIFEEYYKV | |
| italicized text | CQSSIQFSGTKIILNMAMDIPDKEIELDEDVCVGVDLGIAIPA | |
| indicates the | VCALNKNRYSRVSIGSKEDFLRVRTKIRNQRKRLQTNLKSS | |
| NLS. | NGGHGRKKKMKPMDRFRDYEANWVQNYNHYVSRQVVD | |
| Underlined | FAVKNKAKYINLENLEGIRDDVKNEWLLSNWSYYQLQQYI | |
| text indicates a | TYKAKTYGIEVRKINPYHTSQRCSCCGYEDAGNRPKKEKG | |
| 3xFLAG tag) | QAYFKCLKCGEEMNADFNAARNIAMSTEFQSGKKTKKQK | |
| | KEQHENKKRPAATKKAGQAKKKK | |

[0204] In some embodiments, compositions, systems, and methods described herein comprise an effector protein or a nucleic acid encoding the effector protein, wherein the effector protein comprises one or more amino acid alterations relative to a sequence recited in TABLE 15. In some embodiments, an amino acid alteration comprises a deletion of an amino acid. In some embodiments, an amino acid alteration comprises an insertion of an amino acid. In some embodiments, an amino acid alteration comprises a conservative amino acid substitution. In some embodiments, an amino acid alteration comprises a non-conservative amino acid substitution. In some embodiments, one or more amino acid alterations comprises a combination of one or more conservative amino acid substitutions and one or more non-conservative amino acid substitutions. When describing a conservative amino acid substitution herein, reference is made to the replacement of one amino acid for another such that the replacement takes place within a family of amino acids that are related in their side chains. Conversely, when describing a non-conservative alteration (e.g., non-conservative substitution), reference is made to the replacement of one amino acid residue for another that does not have a related side chain. It is understood that genetically encoded amino acids can be divided into four families having related side chains: (1) acidic (negatively charged): Asp (D), Glu (E); (2) basic (positively charged): Lys (K)Arg (R), His (H); (3) non-polar (hydrophobic): Cys (C), Ala (A), Val (V), Leu (L), Ile (I), Pro (P), Phe (F), Met (M), Trp (W), Gly (G), Tyr (Y), with non-polar also being subdivided into: (i) strongly hydrophobic: Ala (A), Val (V), Leu (L), Ile (I), Met (M), Phe (F); and (ii) moderately hydrophobic: Gly (G), Pro (P), Cys (C), Tyr (Y), Trp (W); and (4) uncharged polar: Asn (N), Gln (Q), Ser (S), Thr (T). Amino acids may be related by aliphatic side chains: Gly (G), Ala (A), Val (V), Leu (L), Ile (I), Ser (S), Thr (T), with Ser (S) and Thr (T) optionally being grouped separately as aliphatic-hydroxyl. Amino acids may be related by aromatic side chains: Phe (F), Tyr (Y), Trp (W). Amino acids may be related by amide side chains: Asn (N), Gln (Q). Amino acids may be related by sulfur-containing side chains: Cys (C) and Met (M).

[0205] In some embodiments, effector proteins disclosed herein are engineered proteins. Engineered proteins are not identical to a naturally-occurring protein. Engineered proteins may provide enhanced nuclease or nickase activity as compared to a naturally occurring nuclease or nickase. SEQ ID NO: 34 is a non-limiting example of an engineered protein, wherein residue 26 has been modified to an arginine from a leucine at residue 26 of SEQ ID NO: 32.

[0206] An engineered protein may comprise a modified form of a wild-type counterpart protein (e.g., an effector protein). The modified form of the wild-type counterpart may comprise an amino acid change (e.g., deletion, insertion, or substitution) that reduces the nucleic acid-cleaving activity of the effector protein relative to the wild-type counterpart. For example, a nuclease domain (e.g., RuvC domain) of an effector protein may be deleted or mutated relative to a wild-type counterpart effector protein so that it is no longer functional or comprises reduced nuclease activity. The modified form of the effector protein may have less than 90%, less than 80%, less than 70%, less than 60%, less than 50%, less than 40%, less than 30%, less than 20%, less than 10%, less than 5%, or less than 1% of the nucleic acid-cleaving activity of the wild-type counterpart.

[0207] In some embodiments, effector proteins are engineered variants of CasM.265466 (SEQ ID NO: 773) and CasPhi.12 (SEQ ID NO: 32). Engineered variants of CasM.265466 (SEQ ID NO: 773) and CasPhi.12 (SEQ ID NO: 32) may comprise amino acid substitutions relative to SEQ ID NO: 773 and SEQ ID NO: 32, respectively.

[0208] In some embodiments, an effector protein comprises an amino acid sequence that is at least 65%, at least 70%, at least 75%, at least 80%, at least 85%, at least 90%, at least 95%, at least 97%, or at least 98%, at least 99%, or 100% identical to SEQ ID NO: 32 wherein the amino acid residue at position 26 is arginine (R). In some embodiments, an effector protein comprises an amino acid sequence that is at least 65%, at least 70%, at least 75%, at least 80%, at least 85%, at least 90%, at least 95%, at least 97%, or at least 98%, at least 99%, or 100% identical to SEQ ID NO: 32 wherein the amino acid residue at position 471 is threonine (T). In some embodiments, an effector protein comprises an amino acid sequence that is at least 65%, at least 70%, at least 75%, at least 80%, at least 85%, at least 90%, at least 95%, at least 97%, or at least 98%, at least 99%, or 100% identical to SEQ ID NO: 32 wherein the amino acid residue at position 26 is arginine (R) and the amino acid residue at position 471 is threonine (T).

[0209] In some embodiments, an effector protein comprises an amino acid sequence that is at least 65%, at least 70%, at least 75%, at least 80%, at least 85%, at least 90%, at least 95%, at least 97%, or at least 98%, or at least 99%, identical to SEQ ID NO: 773 wherein the amino acid residue at position 220 is arginine (R). In some embodiments, an effector protein comprises an amino acid sequence that is at least 65%, at least 70%, at least 75%, at least 80%, at least 85%, at least 90%, at least 95%, at least 97%, or at least 98%, at least 99%, or 100% identical to SEQ ID NO: 773 wherein the amino acid residue at position 220 is arginine (R) and the amino acid residue at position 335 is glutamine (Q).

[0210] Exemplary amino acid substitutions are described in TABLES 16-19. The amino acid substitutions in TABLE 16 and TABLE 17 may be combined. The amino acid substitutions in TABLE 16 and TABLE 17 may be combined with other amino acid alterations described herein. The amino acid substitutions in TABLE 18 and TABLE 19 may be combined. The amino acid substitutions in TABLE 18 and TABLE 19 may be combined with other amino acid alterations described herein.

[0211] In certain embodiments, compositions comprise an effector protein and a guide nucleic acid, wherein the effector protein comprises an amino acid sequence that is at least 65%, at least 70%, at least 75%, at least 80%, at least 85%, at least 90%, at least 95%, at least 98%, at least 99%, or 100% identical to any one of the sequences as set forth in TABLE 15. In certain embodiments, compositions comprise an effector protein and a guide nucleic acid, wherein the effector protein comprises an amino acid sequence that is at least 65%, at least 70%, at least 75%, at least 80%, at least 85%, at least 90%, at least 95%, at least 97%, or at least 98%, at least 99%, or 100% identical to any one of the sequences as set forth in TABLE 15, wherein the amino acid residue at position 220, relative to SEQ ID NO: 775, remains unchanged. In other words, the residue of the amino acid sequence that aligns with position 220 of SEQ ID NO: 775 is an arginine when the amino acid sequence is aligned with SEQ ID NO: 773 for maximum identity. In some embodiments, the amino acid sequence of the effector protein is at least 65%, at least 70%, at least 75%, at least 80%, at least 85%, at least 90%, at least 95%, at least 97%, or at least 98%, at least 99%, or 100% identical to any one of the sequences as set forth in TABLE 15. In some embodiments, the amino acid sequence of the effector protein is at least 65%, at least 70%, at least 75%, at least 80%, at least 85%, at least 90%, at least 95%, at least 97%, or at least 98%, at least 99%, or 100% identical to any one of the sequences as set forth in TABLE 15, wherein the amino acid residue at position 220, relative to SEQ ID NO: 773, remains unchanged.

[0212] In certain embodiments, compositions comprise an effector protein and a guide nucleic acid, wherein the effector protein comprises an amino acid sequence that is at least 65%, at least 70%, at least 75%, at least 80%, at least 85%, at least 90%, at least 95%, at least 98%, at least 99%, or 100% identical to any one of the sequences as set forth in TABLE 15. In certain embodiments, compositions comprise an effector protein and a guide nucleic acid, wherein the effector protein comprises an amino acid sequence that is at least 65%, at least 70%, at least 75%, at least 80%, at least 85%, at least 90%, at least 95%, at least 97%, or at least 98%, at least 99%, or 100% identical to any one of the sequences as set forth in TABLE 15, wherein the amino acid residue at position 26, relative to SEQ ID NO: 34, remains unchanged. In other words, the residue of the amino acid sequence that aligns with position 26 of SEQ ID NO: 32 is an arginine. In some embodiments, the amino acid sequence of the effector protein is at least 65%, at least 70%, at least 75%, at least 80%, at least 85%, at least 90%, at least 95%, at least 97%, or at least 98%, at least 99%, or 100% identical to any one of the sequences as set forth in TABLE 15. In some embodiments, the amino acid sequence of the effector protein is at least 65%, at least 70%, at least 75%, at least 80%, at least 85%, at least 90%, at least 95%, at least 97%, or at least 98%, at least 99%, or 100% identical to any one of the sequences as set forth in TABLE 15, wherein the amino acid residue at position 26, relative to SEQ ID NO: 34, remains unchanged.

[0213] In certain embodiments, the amino acid sequence of the effector protein is based on SEQ ID NO: 32 and is modified at position 26. In some embodiments, the modification at position 26 is from leucine to arginine (L26R). In some embodiments, the amino acid sequence of the effector protein is at least 95%, 96%, 97%, 98%, or 99% identical to SEQ ID NO: 34. In some embodiments, the amino acid sequence of the effector protein comprises or consists of SEQ ID NO: 34.

[0214] In certain embodiments, the amino acid sequence of the effector protein is based on SEQ ID NO: 32 and is modified at position 109. In some embodiments, the modification at position 109 is from glutamic acid to arginine (E109R). In some embodiments, the amino acid sequence of the effector protein is at least 95%, 96%, 97%, 98%, or 99% identical to SEQ ID NO: 54. In some embodiments, the amino acid sequence of the effector protein comprises or consists of SEQ ID NO: 54.

[0215] In certain embodiments, the amino acid sequence of the effector protein is based on SEQ ID NO: 32 and is modified at position 208. In some embodiments, the modification at position 208 is from histidine to arginine (H208R). In some embodiments, the amino acid sequence of the effector protein is at least 95%, 96%, 97%, 98%, or 99% identical to SEQ ID NO: 55. In some embodiments, the amino acid sequence of the effector protein comprises or consists of SEQ ID NO: 55.

[0216] In certain embodiments, the amino acid sequence of the effector protein is based on SEQ ID NO: 32 and is modified at position 184. In some embodiments, the modification at position 184 is from lysine to arginine (K184R). In some embodiments, the amino acid sequence of the effector protein is at least 95%, 96%, 97%, 98%, or 99% identical to SEQ ID NO: 56. In some embodiments, the amino acid sequence of the effector protein comprises or consists of SEQ ID NO: 56.

[0217] In certain embodiments, the amino acid sequence of the effector protein is based on SEQ ID NO: 32 and is modified at position 38. In some embodiments, the modification at position 38 is from lysine to arginine (K38R). In some embodiments, the amino acid sequence of the effector protein is at least 95%, 96%, 97%, 98%, or 99% identical to SEQ ID NO: 57. In some embodiments, the amino acid sequence of the effector protein comprises or consists of SEQ ID NO: 57.

[0218] In certain embodiments, the amino acid sequence of the effector protein is based on SEQ ID NO: 32 and is modified at position 182. In some embodiments, the modification at position 182 is from leucine to arginine (L182R). In some embodiments, the amino acid sequence of the effector protein is at least 95%, 96%, 97%, 98%, or 99% identical to SEQ ID NO: 58. In some embodiments, the amino acid sequence of the effector protein comprises or consists of SEQ ID NO: 58.

[0219] In certain embodiments, the amino acid sequence of the effector protein is based on SEQ ID NO: 32 and is modified at position 183. In some embodiments, the modification at position 183 is from glutamine to arginine (Q183R). In some embodiments, the amino acid sequence of the effector protein is at least 95%, 96%, 97%, 98%, or 99% identical to SEQ ID NO: 59. In some embodiments, the amino acid sequence of the effector protein comprises or consists of SEQ ID NO: 59.

[0220] In certain embodiments, the amino acid sequence of the effector protein is based on SEQ ID NO: 32 and is modified at position 108. In some embodiments, the modification at position 108 is from serine to arginine (S108R). In some embodiments, the amino acid sequence of the effector protein is at least 95%, 96%, 97%, 98%, or 99% identical to SEQ ID NO: 60. In some embodiments, the amino acid sequence of the effector protein comprises or consists of SEQ ID NO: 60.

[0221] In certain embodiments, the amino acid sequence of the effector protein is based on SEQ ID NO: 32 and is modified at position 198. In some embodiments, the modification at position 198 is from serine to arginine (S198R). In some embodiments, the amino acid sequence of the effector protein is at least 95%, 96%, 97%, 98%, or 99% identical to SEQ ID NO: 61. In some embodiments, the amino acid sequence of the effector protein comprises or consists of SEQ ID NO: 61.

[0222] In certain embodiments, the amino acid sequence of the effector protein is based on SEQ ID NO: 32 and is modified at position 114. In some embodiments, the modification at position 114 is from threonine to arginine (T114R). In some embodiments, the amino acid sequence of the effector protein is at least 95%, 96%, 97%, 98%, or 99% identical to SEQ ID NO: 62. In some embodiments, the amino acid sequence of the effector protein comprises or consists of SEQ ID NO: 62.

[0223] In certain embodiments, the amino acid sequence of the effector protein is based on SEQ ID NO: 32 and is modified at position 26 and at position 471. In some embodiments, the modification at position 26 is from leucine to arginine (L26R), and the modification at position 471 is from isoleucine to threonine (I471T). In some embodiments, the amino acid sequence of the effector protein is at least 95%, 96%, 97%, 98%, or 99% identical to SEQ ID NO: 2090. In some embodiments, the amino acid sequence of the effector protein comprises or consists of SEQ ID NO: 2090.

[0224] In certain embodiments, the amino acid sequence of the effector protein is based on SEQ ID NO: 32 and is modified at position 471. In some embodiments, the modification at position 471 is from isoleucine to threonine (I471T). In some embodiments, the amino acid sequence of the effector protein is at least 95%, 96%, 97%, 98%, or 99% identical to SEQ ID NO: 2091. In some embodiments, the amino acid sequence of the effector protein comprises or consists of SEQ ID NO: 2091.

[0225] In certain embodiments, the amino acid sequence of the effector protein is based on SEQ ID NO: 773 and is modified at position 220. In some embodiments, the modification at position 220 is from aspartic acid to arginine (D220R). In some embodiments, the amino acid sequence of the effector protein is at least 95%, 96%, 97%, 98%, or 99% identical to SEQ ID NO: 775. In some embodiments, the amino acid sequence of the effector protein comprises or consists of SEQ ID NO: 775.

[0226] In certain embodiments, the amino acid sequence of the effector protein is based on SEQ ID NO: 773 and is modified at position 58. In some embodiments, the modification at position 58 is from lysine to tryptophane (K58W). In some embodiments, the amino acid sequence of the effector protein is at least 95%, 96%, 97%, 98%, or 99% identical to SEQ ID NO: 776. In some embodiments, the amino acid sequence of the effector protein comprises or consists of SEQ ID NO: 776.

[0227] In certain embodiments, the amino acid sequence of the effector protein is based on SEQ ID NO: 773 and is modified at position 218. In some embodiments, the modification at position 218 is from alanine to lysine (A218K). In some embodiments, the amino acid sequence of the effector protein is at least 95%, 96%, 97%, 98%, or 99% identical to SEQ ID NO: 778. In some embodiments, the amino acid sequence of the effector protein comprises or consists of SEQ ID NO: 778.

[0228] In certain embodiments, the amino acid sequence of the effector protein is based on SEQ ID NO: 773 and is modified at position 295. In some embodiments, the modification at position 295 is from methionine to tryptophane (M295W). In some embodiments, the amino acid sequence of the effector protein is at least 95%, 96%, 97%, 98%, or 99% identical to SEQ ID NO: 779. In some embodiments, the amino acid sequence of the effector protein comprises or consists of SEQ ID NO: 779.

[0229] In certain embodiments, the amino acid sequence of the effector protein is based on SEQ ID NO: 773 and is modified at position 298. In some embodiments, the modification at position 298 is from methionine to leucine (M298L). In some embodiments, the amino acid sequence of the effector protein is at least 95%, 96%, 97%, 98%, or 99% identical to SEQ ID NO: 780. In some embodiments, the amino acid sequence of the effector protein comprises or consists of SEQ ID NO: 780.

[0230] In certain embodiments, the amino acid sequence of the effector protein is based on SEQ ID NO: 773 and is modified at position 193. In some embodiments, the modification at position 193 is from asparagine to lysine (N193K). In some embodiments, the amino acid sequence of the effector protein is at least 95%, 96%, 97%, 98%, or 99% identical to SEQ ID NO: 781. In some embodiments, the amino acid sequence of the effector protein comprises or consists of SEQ ID NO: 781.

[0231] In certain embodiments, the amino acid sequence of the effector protein is based on SEQ ID NO: 773 and is modified at position 315. In some embodiments, the modification at position 315 is from tyrosine to methionine (Y315M). In some embodiments, the amino acid sequence of the effector protein is at least 95%, 96%, 97%, 98%, or 99% identical to SEQ ID NO: 782. In some embodiments, the amino acid sequence of the effector protein comprises or consists of SEQ ID NO: 782.

[0232] In certain embodiments, the amino acid sequence of the effector protein is based on SEQ ID NO: 773 and is modified at position 209. In some embodiments, the modification at position 209 is from serine to phenylalanine (S209F). In some embodiments, the amino acid sequence of the effector protein is at least 95%, 96%, 97%, 98%, or 99% identical to SEQ ID NO: 783. In some embodiments, the amino acid sequence of the effector protein comprises or consists of SEQ ID NO: 783.

[0233] In certain embodiments, the amino acid sequence of the effector protein is based on SEQ ID NO: 773 and is modified at position 80. In some embodiments, the modification at position 80 is from isoleucine to lysine (I80K). In some embodiments, the amino acid sequence of the effector protein is at least 95%, 96%, 97%, 98%, or 99% identical to SEQ ID NO: 784. In some embodiments, the amino acid sequence of the effector protein comprises or consists of SEQ ID NO: 784.

[0234] In certain embodiments, the amino acid sequence of the effector protein is based on SEQ ID NO: 773 and is modified at position 225. In some embodiments, the modification at position 225 is from glutamine to lysine (E225K). In some embodiments, the amino acid sequence of the effector protein is at least 95%, 96%, 97%, 98%, or 99% identical to SEQ ID NO: 785. In some embodiments, the amino acid sequence of the effector protein comprises or consists of SEQ ID NO: 785.

[0235] In certain embodiments, the amino acid sequence of the effector protein is based on SEQ ID NO: 773 and is modified at position 286. In some embodiments, the modification at position 286 is from asparagine to lysine (N286K). In some embodiments, the amino acid sequence of the effector protein is at least 95%, 96%, 97%, 98%, or 99% identical to SEQ ID NO: 786. In some embodiments, the amino acid sequence of the effector protein comprises or consists of SEQ ID NO: 786.

[0236] In certain embodiments, the amino acid sequence of the effector protein is based on SEQ ID NO: 773 and is modified at position 306. In some embodiments, the modification at position 306 is from alanine to lysine (A306K). In some embodiments, the amino acid sequence of the effector protein is at least 95%, 96%, 97%, 98%, or 99% identical to SEQ ID NO: 787. In some embodiments, the amino acid sequence of the effector protein comprises or consists of SEQ ID NO: 787.

[0237] In certain embodiments, the amino acid sequence of the effector protein is based on SEQ ID NO: 773 and is modified at position 220 and at position 335. In some embodiments, the modification at position 220 is from aspartic acid leucine to arginine (D220R), and the modification at position 335 is from glutamine to glutamic acid (E335Q). In some embodiments, the amino acid sequence of the effector protein is at least 95%, 96%, 97%, 98%, or 99% identical to SEQ ID NO: 793. In some embodiments, the amino acid sequence of the effector protein comprises or consists of SEQ ID NO: 793.

[0238] In some embodiments, the effector protein is a Type V Cas protein. In some embodiments, the effector protein is CasM.265466 or a variant thereof. A CasM.265466 is around one third of the size of Cas9. The smaller size of CasM.265466 make it ideal to be packaged together with its corresponding guide RNAs into a single AAV vector, thus overcoming the drawbacks of dual AAV vector systems.

[0239] TABLE 16 provides illustrative amino acid sequences of effector proteins. In some embodiments, an effector protein is at least 65%, at least 70%, at least 75%, at least 80%, at least 85%, at least 90%, at least 95%, at least 97%, or at least 98%, at least 99%, or 100% identical to the sequence as set forth in TABLE 16.

[0240] In some embodiments, the effector protein is an engineered effector protein and comprises an amino acid sequence that is at least 90%, at least 95%, at least 97%, at least 98%, or at least 99% identical to SEQ ID NO: 773, wherein the polypeptide comprises at least one amino acid substitution relative to SEQ ID NO: 773, wherein the amino acid substitution is at a position selected from K58, 180, T84, K105, N193, C202, S209, G210, A218, D220, E225, C246, N286, M295, M298, A306, Y315, Q360, and a combination thereof. In some embodiments, the polypeptide comprises an amino acid sequence that is 100% identical to SEQ ID NO: 773, with the exception of at least one amino acid substitution relative to SEQ ID NO: 773, wherein the amino acid substitution is a position selected from K58, 180, T84, K105, N193, C202. S209, G210, A218, D220, E225, C246, N286, M295, M298, A306, Y315, Q360, and a combination thereof. In some embodiments, the amino acid substitution is selected from K58X, I80X, T84X, K105X, N193X, C202X, S209X, G210X, A218X, D220X, E225X, C246X, N286X, M295X, M298X, A306X, Y315X, and Q360X, wherein X is selected from R, K, and H.

[0241] In some embodiments, the effector protein is an engineered effector protein and comprises an amino acid sequence that is at least 90%, at least 95%, at least 97%, at least 98%, or at least 99% identical to SEQ ID NO: 773, wherein the polypeptide comprises at least one amino acid substitution relative to SEQ ID NO: 773, wherein the amino acid substitution is selected from I80R, T84R, K105R, C202R, G210R, A218R, D220R, E225R, C246R, Q360R, 180K, T84K, G210K, N193K, C202K, A218K, D220K, E225K, C246K, N286K, A306K, Q360K, I80H, T84H, K105H, G210H, C202H, A218H, D220H, E225H, C246H, Q360H, K58W, S209F, M295W, M298L, Y315M, D220R/A306K and D220R/K250N and a combination thereof. In some embodiments, the polypeptide comprises an amino acid sequence that is 100% identical to SEQ ID NO: 773, with the exception of at least one amino acid substitution relative to SEQ ID NO: 773, wherein the amino acid substitution is selected from I80R, T84R, K105R, C202R, G210R, A218R, D220R, E225R, C246R, Q360R, 180K, T84K, G210K, N193K, C202K, A218K, D220K, E225K, C246K, N286K, A306K, Q360K, 1801H, T84H, K105H, G210H, C202H14, A2181H, D2201H, E225H, C246H, Q360H, K58W, S209F, M295W, M298L, Y315M, D220R/A306K, D220R/K250N, D220R/E335Q and a combination thereof. In some embodiments, these engineered effector proteins demonstrate enhanced nuclease activity relative to the wild-type effector protein.

[0242] In some embodiments, the effector protein is an engineered effector protein and comprises an amino acid sequence that is at least 90%, at least 95%, at least 97%, at least 98%, or at least 99% identical to SEQ ID NO: 773, wherein the polypeptide comprises at least one amino acid substitution relative to SEQ ID NO: 773, wherein the amino acid substitution is selected from D237A, D418A, D418N, E335A, and E335Q, and a combination thereof. In some embodiments, the polypeptide comprises an amino acid sequence that is 100% identical to SEQ ID NO: 773, with the exception of at least one amino acid substitution relative to SEQ ID NO: 773, wherein the amino acid substitution is selected from D237A, D418A, D418N, E335A, and E335Q, and a combination thereof. In some embodiments, these engineered effector proteins demonstrate reduced or abolished nuclease activity relative to the wild-type effector protein. TABLE 15 provides the exemplary amino acid alterations relative to SEQ ID NO: 773 useful in compositions, systems, and methods described herein.

[0243] In some embodiments, the effector protein is an engineered effector protein and comprises an amino acid sequence that is 100% identical to SEQ ID NO: 773, with the exception of at least two amino acid substitutions relative to SEQ ID NO: 773, wherein the amino acid substitutions comprise D220R/E355Q. In some embodiments, the engineered effector protein comprises or consists of SEQ ID NO: 793.

TABLE 16
Exemplary Amino Acid Sequences of
Engineered Variants of CasM.265466

| Effector | | SEQ |
|---|---|---|
| protein | Amino Acid Sequence | ID NO: |
| CasM.265466 | MSVLTRKVQLIPVGDKEERDRVYKYLRDGIEAQNRAMNLYM | 775 |
| D220R | SGLYFAAINEASKEDRKELNQLYSRIATSSKGSAYTTDIEFPTG | |
| | LASTSTLSMAVRQDFTKSLKDGLMYGRVSLPTYRKDNPLFVD | |
| | VRFVALRGTKQKYNGLYHEYKSHTEFLDNLYSSDLKVYIKFA | |
| | NDITFQVIFGNPRKSSALRSEFQNIFEEYYKVCQSSIQFSGTKIIL | |
| | NMAMRIPDKEIELDEDVCVGVDLGIAIPAVCALNKNRYSRVSI | |
| | GSKEDFLRVRTKIRNQRKRLQTNLKSSNGGHGRKKKMKPMD | |
| | RFRDYEANWVQNYNHYVSRQVVDFAVKNKAKYINLENLEGI | |
| | RDDVKNEWLLSNWSYYQLQQYITYKAKTYGIEVRKINPYHTS | |
| | QRCSCCGYEDAGNRPKKEKGQAYFKCLKCGEEMNADFNAAR | |
| | NIAMSTEFQSGKKTKKQKKEQHENK | |
| CasM.265466 | MSVLTRKVQLIPVGDKEERDRVYKYLRDGIEAQNRAMNLYM | 776 |
| K58W | SGLYFAAINEASKEDRWELNQLYSRIATSSKGSAYTTDIEFPTG | |
| | LASTSTLSMAVRQDFTKSLKDGLMYGRVSLPTYRKDNPLFVD | |
| | VRFVALRGTKQKYNGLYHEYKSHTEFLDNLYSSDLKVYIKFA | |
| | NDITFQVIFGNPRKSSALRSEFQNIFEEYYKVCQSSIQFSGTKIIL | |
| | NMAMDIPDKEIELDEDVCVGVDLGIAIPAVCALNKNRYSRVSI | |
| | GSKEDFLRVRTKIRNQRKRLQTNLKSSNGGHGRKKKMKPMD | |
| | RFRDYEANWVQNYNHYVSRQVVDFAVKNKAKYINLENLEGI | |
| | RDDVKNEWLLSNWSYYQLQQYITYKAKTYGIEVRKINPYHTS | |
| | QRCSCCGYEDAGNRPKKEKGQAYFKCLKCGEEMNADFNAAR | |
| | NIAMSTEFQSGKKTKKQKKEQHENK | |
| CasM.265466 | MSVLTRKVQLIPVGDKEERDRVYKYLRDGIEAQNRAMNLYM | 778 |
| A218K | SGLYFAAINEASKEDRKELNQLYSRIATSSKGSAYTTDIEFPTG | |
| | LASTSTLSMAVRQDFTKSLKDGLMYGRVSLPTYRKDNPLFVD | |
| | VRFVALRGTKQKYNGLYHEYKSHTEFLDNLYSSDLKVYIKFA | |
| | NDITFQVIFGNPRKSSALRSEFQNIFEEYYKVCQSSIQFSGTKIIL | |
| | NMKMDIPDKEIELDEDVCVGVDLGIAIPAVCALNKNRYSRVSI | |
| | GSKEDFLRVRTKIRNQRKRLQTNLKSSNGGHGRKKKMKPMD | |
| | RFRDYEANWVQNYNHYVSRQVVDFAVKNKAKYINLENLEGI | |
| | RDDVKNEWLLSNWSYYQLQQYITYKAKTYGIEVRKINPYHTS | |
| | QRCSCCGYEDAGNRPKKEKGQAYFKCLKCGEEMNADFNAAR | |
| | NIAMSTEFQSGKKTKKQKKEQHENK | |
| CasM.265466 | MSVLTRKVQLIPVGDKEERDRVYKYLRDGIEAQNRAMNLYM | 779 |
| M295W | SGLYFAAINEASKEDRKELNQLYSRIATSSKGSAYTTDIEFPTG | |
| | LASTSTLSMAVRQDFTKSLKDGLMYGRVSLPTYRKDNPLFVD | |
| | VRFVALRGTKQKYNGLYHEYKSHTEFLDNLYSSDLKVYIKFA | |
| | NDITFQVIFGNPRKSSALRSEFQNIFEEYYKVCQSSIQFSGTKIIL | |
| | NMAMDIPDKEIELDEDVCVGVDLGIAIPAVCALNKNRYSRVSI | |
| | GSKEDFLRVRTKIRNQRKRLQTNLKSSNGGHGRKKKWKPMD | |
| | RFRDYEANWVQNYNHYVSRQVVDFAVKNKAKYINLENLEGI | |
| | RDDVKNEWLLSNWSYYQLQQYITYKAKTYGIEVRKINPYHTS | |
| | QRCSCCGYEDAGNRPKKEKGQAYFKCLKCGEEMNADFNAAR | |
| | NIAMSTEFQSGKKTKKQKKEQHENK | |
| CasM.265466 | MSVLTRKVQLIPVGDKEERDRVYKYLRDGIEAQNRAMNLYM | 780 |
| M298L | SGLYFAAINEASKEDRKELNQLYSRIATSSKGSAYTTDIEFPTG | |
| | LASTSTLSMAVRQDFTKSLKDGLMYGRVSLPTYRKDNPLFVD | |
| | VRFVALRGTKQKYNGLYHEYKSHTEFLDNLYSSDLKVYIKFA | |
| | NDITFQVIFGNPRKSSALRSEFQNIFEEYYKVCQSSIQFSGTKIIL | |
| | NMAMDIPDKEIELDEDVCVGVDLGIAIPAVCALNKNRYSRVSI | |
| | GSKEDFLRVRTKIRNQRKRLQTNLKSSNGGHGRKKKMKPLDR | |
| | FRDYEANWVQNYNHYVSRQVVDFAVKNKAKYINLENLEGIR | |
| | DDVKNEWLLSNWSYYQLQQYITYKAKTYGIEVRKINPYHTSQ | |
| | RCSCCGYEDAGNRPKKEKGQAYFKCLKCGEEMNADFNAARN | |
| | IAMSTEFQSGKKTKKQKKEQHENK | |
| CasM.265466 | MSVLTRKVQLIPVGDKEERDRVYKYLRDGIEAQNRAMNLYM | 781 |
| N193K | SGLYFAAINEASKEDRKELNQLYSRIATSSKGSAYTTDIEFPTG | |
| | LASTSTLSMAVRQDFTKSLKDGLMYGRVSLPTYRKDNPLFVD | |
| | VRFVALRGTKQKYNGLYHEYKSHTEFLDNLYSSDLKVYIKFA | |
| | NDITFQVIFGNPRKSSALRSEFQKIFEEYYKVCQSSIQFSGTKIIL | |
| | NMAMDIPDKEIELDEDVCVGVDLGIAIPAVCALNKNRYSRVSI | |
| | GSKEDFLRVRTKIRNQRKRLQTNLKSSNGGHGRKKKMKPMD | |
| | RFRDYEANWVQNYNHYVSRQVVDFAVKNKAKYINLENLEGI | |
| | RDDVKNEWLLSNWSYYQLQQYITYKAKTYGIEVRKINPYHTS | |
| | QRCSCCGYEDAGNRPKKEKGQAYFKCLKCGEEMNADFNAAR | |
| | NIAMSTEFQSGKKTKKQKKEQHENK | |
| CasM.265466 | MSVLTRKVQLIPVGDKEERDRVYKYLRDGIEAQNRAMNLYM | 782 |
| Y315M | SGLYFAAINEASKEDRKELNQLYSRIATSSKGSAYTTDIEFPTG | |
| | LASTSTLSMAVRQDFTKSLKDGLMYGRVSLPTYRKDNPLFVD | |
| | VRFVALRGTKQKYNGLYHEYKSHTEFLDNLYSSDLKVYIKFA | |
| | NDITFQVIFGNPRKSSALRSEFQNIFEEYYKVCQSSIQFSGTKIIL | |
| | NMAMDIPDKEIELDEDVCVGVDLGIAIPAVCALNKNRYSRVSI | |
| | GSKEDFLRVRTKIRNQRKRLQTNLKSSNGGHGRKKKMKPMD | |
| | RFRDYEANWVQNYNHMVSRQVVDFAVKNKAKYINLENLEGI | |
| | RDDVKNEWLLSNWSYYQLQQYITYKAKTYGIEVRKINPYHTS | |
| | QRCSCCGYEDAGNRPKKEKGQAYFKCLKCGEEMNADFNAAR | |
| | NIAMSTEFQSGKKTKKQKKEQHENK | |
| CasM.265466 | MSVLTRKVQLIPVGDKEERDRVYKYLRDGIEAQNRAMNLYM | 783 |
| S209F | SGLYFAAINEASKEDRKELNQLYSRIATSSKGSAYTTDIEFPTG | |
| | LASTSTLSMAVRQDFTKSLKDGLMYGRVSLPTYRKDNPLFVD | |
| | VRFVALRGTKQKYNGLYHEYKSHTEFLDNLYSSDLKVYIKFA | |
| | NDITFQVIFGNPRKSSALRSEFQNIFEEYYKVCQSSIQFFGTKIIL | |
| | NMAMDIPDKEIELDEDVCVGVDLGIAIPAVCALNKNRYSRVSI | |
| | GSKEDFLRVRTKIRNQRKRLQTNLKSSNGGHGRKKKMKPMD | |
| | RFRDYEANWVQNYNHYVSRQVVDFAVKNKAKYINLENLEGI | |
| | RDDVKNEWLLSNWSYYQLQQYITYKAKTYGIEVRKINPYHTS | |
| | QRCSCCGYEDAGNRPKKEKGQAYFKCLKCGEEMNADFNAAR | |
| | NIAMSTEFQSGKKTKKQKKEQHENK | |
| CasM.265466 | MSVLTRKVQLIPVGDKEERDRVYKYLRDGIEAQNRAMNLYM | 784 |
| I80K | SGLYFAAINEASKEDRKELNQLYSRIATSSKGSAYTTDKEFPTG | |
| | LASTSTLSMAVRQDFTKSLKDGLMYGRVSLPTYRKDNPLFVD | |
| | VRFVALRGTKQKYNGLYHEYKSHTEFLDNLYSSDLKVYIKFA | |
| | NDITFQVIFGNPRKSSALRSEFQNIFEEYYKVCQSSIQFSGTKIIL | |
| | NMAMDIPDKEIELDEDVCVGVDLGIAIPAVCALNKNRYSRVSI | |
| | GSKEDFLRVRTKIRNQRKRLQTNLKSSNGGHGRKKKMKPMD | |
| | RFRDYEANWVQNYNHYVSRQVVDFAVKNKAKYINLENLEGI | |
| | RDDVKNEWLLSNWSYYQLQQYITYKAKTYGIEVRKINPYHTS | |
| | QRCSCCGYEDAGNRPKKEKGQAYFKCLKCGEEMNADFNAAR | |
| | NIAMSTEFQSGKKTKKQKKEQHENK | |
| CasM.265466 | MSVLTRKVQLIPVGDKEERDRVYKYLRDGIEAQNRAMNLYM | 785 |
| E225K | SGLYFAAINEASKEDRKELNQLYSRIATSSKGSAYTTDIEFPTG | |
| | LASTSTLSMAVRQDFTKSLKDGLMYGRVSLPTYRKDNPLFVD | |
| | VRFVALRGTKQKYNGLYHEYKSHTEFLDNLYSSDLKVYIKFA | |
| | NDITFQVIFGNPRKSSALRSEFQNIFEEYYKVCQSSIQFSGTKIIL | |
| | NMAMDIPDKKIELDEDVCVGVDLGIAIPAVCALNKNRYSRVSI | |
| | GSKEDFLRVRTKIRNQRKRLQTNLKSSNGGHGRKKKMKPMD | |
| | RFRDYEANWVQNYNHYVSRQVVDFAVKNKAKYINLENLEGI | |
| | RDDVKNEWLLSNWSYYQLQQYITYKAKTYGIEVRKINPYHTS | |
| | QRCSCCGYEDAGNRPKKEKGQAYFKCLKCGEEMNADFNAAR | |
| | NIAMSTEFQSGKKTKKQKKEQHENK | |
| CasM.265466 | MSVLTRKVQLIPVGDKEERDRVYKYLRDGIEAQNRAMNLYM | 786 |
| N286K | SGLYFAAINEASKEDRKELNQLYSRIATSSKGSAYTTDIEFPTG | |
| | LASTSTLSMAVRQDFTKSLKDGLMYGRVSLPTYRKDNPLFVD | |
| | VRFVALRGTKQKYNGLYHEYKSHTEFLDNLYSSDLKVYIKFA | |
| | NDITFQVIFGNPRKSSALRSEFQNIFEEYYKVCQSSIQFSGTKIIL | |
| | NMAMDIPDKEIELDEDVCVGVDLGIAIPAVCALNKNRYSRVSI | |
| | GSKEDFLRVRTKIRNQRKRLQTNLKSSKGGHGRKKKMKPMD | |
| | RFRDYEANWVQNYNHYVSRQVVDFAVKNKAKYINLENLEGI | |
| | RDDVKNEWLLSNWSYYQLQQYITYKAKTYGIEVRKINPYHTS | |
| | QRCSCCGYEDAGNRPKKEKGQAYFKCLKCGEEMNADFNAAR | |
| | NIAMSTEFQSGKKTKKQKKEQHENK | |
| CasM.265466 | MSVLTRKVQLIPVGDKEERDRVYKYLRDGIEAQNRAMNLYM | 787 |
| A306K | SGLYFAAINEASKEDRKELNQLYSRIATSSKGSAYTTDIEFPTG | |
| | LASTSTLSMAVRQDFTKSLKDGLMYGRVSLPTYRKDNPLFVD | |
| | VRFVALRGTKQKYNGLYHEYKSHTEFLDNLYSSDLKVYIKFA | |
| | NDITFQVIFGNPRKSSALRSEFQNIFEEYYKVCQSSIQFSGTKIIL | |
| | NMAMDIPDKEIELDEDVCVGVDLGIAIPAVCALNKNRYSRVSI | |
| | GSKEDFLRVRTKIRNQRKRLQTNLKSSNGGHGRKKKMKPMD | |
| | RFRDYEKNWVQNYNHYVSRQVVDFAVKNKAKYINLENLEGI | |
| | RDDVKNEWLLSNWSYYQLQQYITYKAKTYGIEVRKINPYHTS | |
| | QRCSCCGYEDAGNRPKKEKGQAYFKCLKCGEEMNADFNAAR | |
| | NIAMSTEFQSGKKTKKQKKEQHENK | |
| CasM.265466 | MSVLTRKVQLIPVGDKEERDRVYKYLRDGIEAQNRAMNLYM | 788 |
| E335Q | SGLYFAAINEASKEDRKELNQLYSRIATSSKGSAYTTDIEFPTG | |
| | LASTSTLSMAVRQDFTKSLKDGLMYGRVSLPTYRKDNPLFVD | |
| | VRFVALRGTKQKYNGLYHEYKSHTEFLDNLYSSDLKVYIKFA | |
| | NDITFQVIFGNPRKSSALRSEFQNIFEEYYKVCQSSIQFSGTKIIL | |
| | NMAMDIPDKEIELDEDVCVGVDLGIAIPAVCALNKNRYSRVSI | |
| | GSKEDFLRVRTKIRNQRKRLQTNLKSSNGGHGRKKKMKPMD | |
| | RFRDYEANWVQNYNHYVSRQVVDFAVKNKAKYINLQNLEGI | |
| | RDDVKNEWLLSNWSYYQLQQYITYKAKTYGIEVRKINPYHTS | |
| | QRCSCCGYEDAGNRPKKEKGQAYFKCLKCGEEMNADFNAAR | |
| | NIAMSTEFQSGKKTKKQKKEQHENK | |
| CasM.265466 | MSVLTRKVQLIPVGDKEERDRVYKYLRDGIEAQNRAMNLYM | 789 |
| D237A | SGLYFAAINEASKEDRKELNQLYSRIATSSKGSAYTTDIEFPTG | |
| | LASTSTLSMAVRQDFTKSLKDGLMYGRVSLPTYRKDNPLFVD | |
| | VRFVALRGTKQKYNGLYHEYKSHTEFLDNLYSSDLKVYIKFA | |
| | NDITFQVIFGNPRKSSALRSEFQNIFEEYYKVCQSSIQFSGTKIIL | |
| | NMAMDIPDKEIELDEDVCVGVALGIAIPAVCALNKNRYSRVSI | |
| | GSKEDFLRVRTKIRNQRKRLQTNLKSSNGGHGRKKKMKPMD | |
| | RFRDYEANWVQNYNHYVSRQVVDFAVKNKAKYINLENLEGI | |
| | RDDVKNEWLLSNWSYYQLQQYITYKAKTYGIEVRKINPYHTS | |
| | QRCSCCGYEDAGNRPKKEKGQAYFKCLKCGEEMNADFNAAR | |
| | NIAMSTEFQSGKKTKKQKKEQHENK | |
| CasM.265466 | MSVLTRKVQLIPVGDKEERDRVYKYLRDGIEAQNRAMNLYM | 790 |
| D418A | SGLYFAAINEASKEDRKELNQLYSRIATSSKGSAYTTDIEFPTG | |
| | LASTSTLSMAVRQDFTKSLKDGLMYGRVSLPTYRKDNPLFVD | |
| | VRFVALRGTKQKYNGLYHEYKSHTEFLDNLYSSDLKVYIKFA | |
| | NDITFQVIFGNPRKSSALRSEFQNIFEEYYKVCQSSIQFSGTKIIL | |
| | NMAMDIPDKEIELDEDVCVGVDLGIAIPAVCALNKNRYSRVSI | |
| | GSKEDFLRVRTKIRNQRKRLQTNLKSSNGGHGRKKKMKPMD | |
| | RFRDYEANWVQNYNHYVSRQVVDFAVKNKAKYINLENLEGI | |
| | RDDVKNEWLLSNWSYYQLQQYITYKAKTYGIEVRKINPYHTS | |
| | QRCSCCGYEDAGNRPKKEKGQAYFKCLKCGEEMNAAFNAAR | |
| | NIAMSTEFQSGKKTKKQKKEQHENK | |
| CasM.265466 | MSVLTRKVQLIPVGDKEERDRVYKYLRDGIEAQNRAMNLYM | 791 |
| D418N | SGLYFAAINEASKEDRKELNQLYSRIATSSKGSAYTTDIEFPTG | |
| | LASTSTLSMAVRQDFTKSLKDGLMYGRVSLPTYRKDNPLFVD | |
| | VRFVALRGTKQKYNGLYHEYKSHTEFLDNLYSSDLKVYIKFA | |
| | NDITFQVIFGNPRKSSALRSEFQNIFEEYYKVCQSSIQFSGTKIIL | |
| | NMAMDIPDKEIELDEDVCVGVDLGIAIPAVCALNKNRYSRVSI | |
| | GSKEDFLRVRTKIRNQRKRLQTNLKSSNGGHGRKKKMKPMD | |
| | RFRDYEANWVQNYNHYVSRQVVDFAVKNKAKYINLENLEGI | |
| | RDDVKNEWLLSNWSYYQLQQYITYKAKTYGIEVRKINPYHTS | |
| | QRCSCCGYEDAGNRPKKEKGQAYFKCLKCGEEMNANFNAAR | |
| | NIAMSTEFQSGKKTKKQKKEQHENK | |
| CasM.265466 | MSVLTRKVQLIPVGDKEERDRVYKYLRDGIEAQNRAMNLYM | 792 |
| E335A | SGLYFAAINEASKEDRKELNQLYSRIATSSKGSAYTTDIEFPTG | |
| | LASTSTLSMAVRQDFTKSLKDGLMYGRVSLPTYRKDNPLFVD | |
| | VRFVALRGTKQKYNGLYHEYKSHTEFLDNLYSSDLKVYIKFA | |
| | NDITFQVIFGNPRKSSALRSEFQNIFEEYYKVCQSSIQFSGTKIIL | |
| | NMAMDIPDKEIELDEDVCVGVDLGIAIPAVCALNKNRYSRVSI | |
| | GSKEDFLRVRTKIRNQRKRLQTNLKSSNGGHGRKKKMKPMD | |
| | RFRDYEANWVQNYNHYVSRQVVDFAVKNKAKYINLANLEGI | |
| | RDDVKNEWLLSNWSYYQLQQYITYKAKTYGIEVRKINPYHTS | |
| | QRCSCCGYEDAGNRPKKEKGQAYFKCLKCGEEMNADFNAAR | |
| | NIAMSTEFQSGKKTKKQKKEQHENK | |
| CasM.265466 | MSVLTRKVQLIPVGDKEERDRVYKYLRDGIEAQNRAMNLYM | 793 |
| D220R- | SGLYFAAINEASKEDRKELNQLYSRIATSSKGSAYTTDIEFPTG | |
| E335Q | LASTSTLSMAVRQDFTKSLKDGLMYGRVSLPTYRKDNPLFVD | |
| | VRFVALRGTKQKYNGLYHEYKSHTEFLDNLYSSDLKVYIKFA | |
| | NDITFQVIFGNPRKSSALRSEFQNIFEEYYKVCQSSIQFSGTKIIL | |
| | NMAMRIPDKEIELDEDVCVGVDLGIAIPAVCALNKNRYSRVSI | |
| | GSKEDFLRVRTKIRNQRKRLQTNLKSSNGGHGRKKKMKPMD | |
| | RFRDYEANWVQNYNHYVSRQVVDFAVKNKAKYINLQNLEGI | |
| | RDDVKNEWLLSNWSYYQLQQYITYKAKTYGIEVRKINPYHTS | |
| | QRCSCCGYEDAGNRPKKEKGQAYFKCLKCGEEMNADFNAAR | |
| | NIAMSTEFQSGKKTKKQKKEQHENK | |

TABLE 17
Exemplary Amino Acid Alterations Relative to SEQ ID NO: 773

| Effects | Amino Acid Alterations |
|---|---|
| | At least one substitution (i.e., with R, K or H) selected |
| | from K58, I80, T84, K105, N193, C202, S209, G210, |
| | A218, D220, E225, C246, N286, M295, M298, A306, |
| | Y315, and Q360 |
| Enhanced nuclease activity | I80R, T84R, K105R, C202R, G210R, A218R, D220R, |
| relative to the wild-type effector | E225R, C246R, Q360R, I80K, T84K, G210K, N193K, |
| protein | C202K, A218K, D220K, E225K, C246K, N286K, |
| | A306K, Q360K, I80H, T84H, K105H, G210H, C202H, |
| | A218H, D220H, E225H, C246H, Q360H, K58W, |
| | S209F, M295W, M298L, Y315M |
| | Double mutations: D220R/A306K, D220R/K250N |
| Reduced or abolished nuclease | D237A, D418A, D418N, E335A, E335Q |
| activity relative to the wild-type | |
| effector protein | |

[0244] TABLE 18 provides illustrative amino acid sequences of effector proteins. In some embodiments, an effector protein is at least 65%, at least 70%, at least 75%, at least 80%, at least 85%, at least 90%, at least 95%, at least 97%, or at least 98%, at least 99%, or 100% identical to the sequence as set forth in TABLE 18.

[0245] In some embodiments, the effector protein is an engineered effector protein and comprises an amino acid sequence that is at least 90%, at least 95%, at least 97%, at least 98%, or at least 99% identical to SEQ ID NO: 32, wherein the polypeptide comprises at least one amino acid substitution relative to SEQ ID NO: 32, wherein the amino acid substitution is at a position selected from 12, T5, K15, R18, 1120, S21, L26, N30, E33, E34, A35, K37, K38, R41, N43, Q54, Q79R, K92E, K99R, S108, E109, H110, G111, D113, T114, P116, K118, E119, A121, N132, K135, Q138, V139, N148, L149, E157, E164, E166, E170, Y180, L182, Q183, K184, S186, K189, S196, S198, K200, 1203, S205, K206, Y207, H208, N209, Y220, S223, E258, K281, K348, N355, S362, I406, I435, I471, I489, Y490, F491, D495, K496, K498, K500, D501, V502, K504, S505, D506, V521, N568, S579, Q612, S638, F701, P707, and a combination thereof. In some embodiments, the polypeptide comprises an amino acid sequence that is 100% identical to SEQ ID NO: 32, with the exception of at least one amino acid substitution relative to SEQ ID NO: 32, wherein the amino acid substitution is at a position selected from 12, T5, K15, R18, H20, S21, L26, N30, E33, E34, A35, K37, K38, R41, N43, Q54, Q79R, K92E, K99R, S108, E109, H110, G111, D113, T114, P116, K118, E119, A121, N132, K135, Q138, V139. N148, L149, E157, E164, E166, E170, Y180, L182, Q183, K184, S186, K189, S196, S198, K200, 1203, S205, K206, Y207, H208, N209, Y220, S223, E258, K281, K348, N355, S362, N406, K435, 1471, 1489, Y490, F491, D495, K496, K498, K500, D501, V502, K504, S505, D506, V521, N568, S579, Q612, S638, F701, P707, and a combination thereof. In some embodiments, the amino acid substitution is selected from I2X, T5X, K15X, R18X, 120X, S21X, L26X, N30X, E33X, E34X, A35X, K37X, K38X, R41X, N43X, Q54X, Q79RX, K92EX, K99RX, S108X, E109X, H110X, G111X, D113X, T114X, P116X, K118X, E119X, A121X. N132X, K135X. Q138X, V139X, N148X, L149X, E157X, E164X, E166X, E170X, Y180X, L182X, Q183X, K184X, S186K, K189X, S196X, S198X, K200X, 1203X, S205X, K206X, Y207X, 1208X, N209X, Y220X, S223X, E258X, K281X, K348X, N355X, S362X, N406X, K435X, I471X, 1489X, Y490X, F491X, D495X, K496X, K498X, K500X, D501X, V502K, K504X, S505X, D506X, V521X, N568X, S579X, Q612X, S638X, F701X, P707X, wherein X is selected from R, K. and H.

[0246] In some embodiments, the effector protein is an engineered effector protein and comprises an amino acid sequence that is at least 90%, at least 95%, at least 97%, at least 98%, or at least 99% identical to SEQ ID NO: 32, wherein the polypeptide comprises at least one amino acid substitution relative to SEQ ID NO: 32 wherein the amino acid substitution is selected from T5R, L26R, L26K, A121Q, V139R, S198R, S223P, E258K, 1471T, S579R, F701R, P707R, K189P, S638K, Q54R, Q79R, Y220S, N406K, E119S, K92E. K435Q, N568D, and V521T, and a combination thereof. In some embodiments, the polypeptide comprises an amino acid sequence that is 100% identical to SEQ ID NO: 32, with the exception of at least one amino acid substitution relative to SEQ ID NO: 32, wherein the amino acid substitution is selected from T5R, L26R, L26K, A121Q, V139R, S198R, S223P, E258K, 1471T. S579R, F701R, P707R, K189P, S638K, Q54R, Q79R, Y220S, N406K, E119S, K92E, K435Q, N568D, and V521T, and a combination thereof. In some embodiments, these engineered effector proteins demonstrate enhanced nuclease activity relative to the wild-type effector protein.

[0247] In some embodiments, the effector protein is an engineered effector protein and comprises an amino acid sequence that is at least 90%, at least 95%, at least 97%, at least 98%, or at least 99% identical to SEQ ID NO: 32, wherein the polypeptide comprises at least one amino acid substitution relative to SEQ ID NO: 32 wherein the amino acid substitution is selected from L26K/A121Q, L26R/A121Q, K99R/L149R, K99R/N148R, L149R/H208R, S362R/L26R L26R/N148R, L26R/H208R, N30R/N148R, L26R/K99R, L26R/P707R, L26R/1L149R, L26R/N30R, L26R/N355R, L26R/K281R, L26R/S108R, L26R/K348R, T5R/V139R, 12R/V139R, K99R/S186R, L26R/A673G, L26R/Q674R, S579R/L26K, F701R/E258K, T5R/L26K, L26R/K435Q, L26K/E567Q, L26R/G685R, L26R/Q674K, L26R/P699R, L26R/T70E, L26R/Q232R, L26R/T252R, L26R/P679R, L26R/E83K, L26R/E73P, L26R/K248E, L26R, T5R/S223P, S579R/S223P, L26R/S223P, T5R/A121Q, L26R/A696R, S198R/1471T, L26R/N153R, L26R/E682R, L26R/D703R, Q612R/126K, L26R/1471T, K348R/L26K, S579R/T471T, L26R/V228R, T5R/S638K, S579R/K189P, S579R1E258K, L26R/K260R, 126R/S638K, S579R/Y220S, T5R/I471 T, 126R/F233R, L26R/V521T, F701R/A121Q, L26R/G361R, S198R/E258K, L26R/S472R, T5R/Y220S, L26R/A150K, L26R/S684R, L26R/E157R, L26R/K248R, F701R/L26K, S198R/N406K, S198R/Y220S, S198R/S638K, S198R/V521 T, S579R/A121Q, K348R/Y220S, S198R1K189P, 126R/E242R, L26R/K678R, T5R/1406K, L26R/I158K, T5R/V521T, L26R/N259R, L26R/K257R, L26R/K256R, T5R/K189P, L26R/C405R, S579R/V521T, S579R/N406K, T5R/K92E, T5R/E258K, L26R/197R, S579R/S638K, T5R/K435Q, F701R/S638K, L26R/L236R, L26R, I1471T, F701R/I471T, Q612R/S223P, F701R/S223P, S198R/E119S, S579R/K92E, L26R/E715R, Q612R/471T, F701R/Y220S, S198R/S223P, and L26R/K266R, and a combination thereof. In some embodiments, the polypeptide comprises an amino acid sequence that is 100% identical to SEQ ID NO: 32, with the exception of at least one amino acid substitution relative to SEQ ID NO: 32, wherein the amino acid substitution is selected from L26K/A121Q, L26R/A121Q, K99R/L149R, K99R/N148R, L149R/H208R, S362R/L26R L26R/N148R, L26R/H208R, N30R/N148R, L26R/K99R, L26R/P707R, L26R/L149R, L26R/N30R, L26R/N355R, L26R/K281R, L26R/S108R, L26R/K348R, T5R/V139R, I2R/V139R, K99R/S186R, L26R/A673G, L26K/E567Q, L26R/Q674R, S579R/L26K, F701R/E258K, T5R/L26K, L26R/K435Q, L26R/G685R, L26R/Q674K, L26R/P699R, L26R/T70E, L26R/Q232R, L26R/T252R, L26R/P679R, L26R/E83K, L26R/E73P, L26R/K248E, L26R, T5R′ S223P, S579R/S223P, L26R/S223P, T5R/A121Q L26R/A696R, S198R/1471T, L26R/N153R, L26R/E682R, L26R/D703R, Q612R/L26K, L26R/1471T, K348R/126K, S579R/I471T, L26R/V228R, T5R/S638K, S579R/K189P, S579R/E258K, L26R/K260R, L26R/S638K, S579R/Y220S, T5R/I471T, L26R/F233R, L26R/V521T, F701R/A121Q, L26R/G361R, S198R/E258K, L26R/S472R, T5R/Y220S, L26R/A150K, L26R/S684R, L26R/E157R, L26R/K248R, F701R/L26K, S198R/N406K, S198R/Y220S, S198R/S638K, S198R/V521T, S579R/A121Q, K348R/Y220S, S198R/K189P, L26R/E242R, L26R/K678R, T5R/N406K, L26R/T158K, T5R/V521T, L26R/N259R, L26R/K257R, L26R/K256R, T5R/K189P, L26R/C405R, S579R/V521 T, S579R/N406K, T5R/K92E, T5R/E258K, L26R/I97R, S579R/S638K, T5R/K435Q, F701R/S638K, L26R/L236R, L26R/1471T, F701R/I471T, Q612R/S223P, F701R/S223P, S198R/E119S, S579R/K92E, L26R/E715R, Q612R/1471T, F701R/Y220S, S198R/S223P, and L26R/K266R, and a combination thereof. In some embodiments, these engineered effector proteins demonstrate enhanced nuclease activity relative to the wild-type effector protein.

[0248] In some embodiments, the polypeptide comprises an amino acid sequence that is 100% identical to SEQ ID NO: 32, with the exception of at least two amino acid substitutions relative to SEQ ID NO: 32, wherein the amino acid substitutions comprise L26K/E567Q. In some embodiments, the polypeptide comprises or consists of SEQ ID NO: 794.

[0249] In some embodiments, the effector protein is an engineered effector protein and comprises an amino acid sequence that is at least 90%, at least 95%, at least 97%, at least 98%, or at least 99% identical to SEQ ID NO: 32, wherein the polypeptide comprises at least one amino acid substitution relative to SEQ ID NO: 32 wherein the amino acid substitution is selected from E157A, E164A, E164L, E166A, E166I, E170A, 1489A, 1489S, Y490S, Y490A, F491A, F491S, F491G, D495G, D495R, D495K, K496A, K496S, K498A, K498S, K500A, K500S, D501R, D501 G, D501K, V502A, V502S, K504A, K504S, S505R, D506A, and a combination thereof. In some embodiments, the polypeptide comprises an amino acid sequence that is 100% identical to SEQ ID NO: 32, with the exception of at least one amino acid substitution relative to SEQ ID NO: 32, wherein the amino acid substitution is selected from E157A, E164A, E164L, E166A, E166I, E170A, 1489A, 1489S, Y490S, Y490A, F491A, F491S, F491G, D495G, D495R, D495K, K496A, K496S, K498A, K498S, K500A, K500S, D501R, D501G, D501K, V502A, V502S, K504A, K504S, S505R, D506A, and a combination thereof. In some embodiments, these engineered effector proteins comprise a nickase activity.

[0250] In some embodiments, the effector protein is an engineered effector protein and comprises an amino acid sequence that is at least 90%, at least 95%, at least 97%, at least 98%, or at least 99% identical to SEQ ID NO: 32, wherein amino acids S478-S505 have been deleted. In some embodiments, the effector protein is an engineered effector protein that is at least 90%, at least 95%, at least 97%, at least 98%, or at least 99% identical to SEQ ID NO: 32, wherein amino acids S478-S505 have been deleted and replaced with SDLYIERGGDPRDVHQQVETKPKGKRKSEIRILKIR (SEQ ID NO: 205) or SDYIVDHGGDPEKVFFETKSKKDKTKRYKRR (SEQ ID NO: 206) In some embodiments, the effector protein is an engineered effector protein and comprises an amino acid sequence that is at least 90%, at least 95%, at least 97%, at least 98%, at least 99% identical, or is 100% identical to SEQ ID NO: 203. In some embodiments, the effector protein is an engineered effector protein and comprises an amino acid sequence that is at least 90%, at least 95%, at least 97%, at least 98%, at least 99% identical, or is 100% identical to SEQ ID NO: 204.

[0251] In some embodiments, the effector protein is an engineered effector protein and comprises an amino acid sequence that is at least 90%, at least 95%, at least 97%, at least 98%, or at least 99% identical to SEQ ID NO: 32, wherein the polypeptide comprises at least one amino acid substitution relative to SEQ ID NO: 32 wherein the amino acid substitution is selected from D369A, D369N, D658A, D658N, E567A, E567Q, and a combination thereof. In some embodiments, the polypeptide comprises an amino acid sequence that is 100% identical to SEQ ID NO: 32, with the exception of at least one amino acid substitution relative to SEQ ID NO: 32, wherein the amino acid substitution is selected from D369A, D369N, D658A, D658N, E567A, E567Q, and a combination thereof. In some embodiments, these engineered effector proteins demonstrate reduced or abolished nuclease activity relative to the wild-type effector protein. TABLE 18 provides the exemplary amino acid alterations relative to SEQ ID NO: 32 useful in compositions, systems, and methods described herein.

TABLE 18
Exemplary Amino Acid Sequences of
Engineered Variants of CasPhi.12

| Effector | | SEQ |
|---|---|---|
| protein | Amino Acid Sequence | ID NO: |
| CasPhi.12 | MIKPTVSQFLTPGFKLIRNHSRTAGRKLKNEGEEACKKFVREN | 34 |
| L26R | EIPKDECPNFQGGPAIANIIAKSREFTEWEIYQSSLAIQEVIFTLP | |
| | KDKLPEPILKEEWRAQWLSEHGLDTVPYKEAAGLNLIIKNAVN | |
| | TYKGVQVKVDNKNKNNLAKINRKNEIAKLNGEQEISFEEIKAF | |
| | DDKGYLLQKPSPNKSIYCYQSVSPKPFITSKYHNVNLPEEYIGY | |
| | YRKSNEPIVSPYQFDRLRIPIGEPGYVPKWQYTFLSKKENKRRK | |
| | LSKRIKNVSPILGIICIKKDWCVFDMRGLLRTNHWKKYHKPTD | |
| | SINDLFDYFTGDPVIDTKANVVRFRYKMENGIVNYKPVREKKG | |
| | KELLENICDQNGSCKLATVDVGQNNPVAIGLFELKKVNGELTK | |
| | TLISRHPTPIDFCNKITAYRERYDKLESSIKLDAIKQLTSEQKIEV | |
| | DNYNNNFTPQNTKQIVCSKLNINPNDLPWDKMISGTHFISEKA | |
| | QVSNKSEIYFTSTDKGKTKDVMKSDYKWFQDYKPKLSKEVRD | |
| | ALSDIEWRLRRESLEFNKLSKSREQDARQLANWISSMCDVIGIE | |
| | NLVKKNNFFGGSGKREPGWDNFYKPKKENRWWINAIHKALT | |
| | ELSQNKGKRVILLPAMRTSITCPKCKYCDSKNRNGEKFNCLKC | |
| | GIELNADIDVATENLATVAITAQSMPKPTCERSGDAKKPVRAR | |
| | KAKAPEFHDKLAPSYTVVLREAV | |
| 3x Flag- | MDYKDHDGDYKDHDIDYKDDDDKMAPKKKRKVGIHGVPAA | 35 |
| SV40NLS- | MIKPTVSQFLTPGFKLIRNHSRTAGRKLKNEGEEACKKFVREN | |
| CasPhi12 | EIPKDECPNFQGGPAIANIIAKSREFTEWEIYQSSLAIQEVIFTLP | |
| L26R- | KDKLPEPILKEEWRAQWLSEHGLDTVPYKEAAGLNLIIKNAVN | |
| NLS | TYKGVQVKVDNKNKNNLAKINRKNEIAKLNGEQEISFEEIKAF | |
| | DDKGYLLQKPSPNKSIYCYQSVSPKPFITSKYHNVNLPEEYIGY | |
| | YRKSNEPIVSPYQFDRLRIPIGEPGYVPKWQYTFLSKKENKRRK | |
| | LSKRIKNVSPILGIICIKKDWCVFDMRGLLRTNHWKKYHKPTD | |
| | SINDLFDYFTGDPVIDTKANVVRFRYKMENGIVNYKPVREKKG | |
| | KELLENICDQNGSCKLATVDVGQNNPVAIGLFELKKVNGELTK | |
| | TLISRHPTPIDFCNKITAYRERYDKLESSIKLDAIKQLTSEQKIEV | |
| | DNYNNNFTPQNTKQIVCSKLNINPNDLPWDKMISGTHFISEKA | |
| | QVSNKSEIYFTSTDKGKTKDVMKSDYKWFQDYKPKLSKEVRD | |
| | ALSDIEWRLRRESLEFNKLSKSREQDARQLANWISSMCDVIGIE | |
| | NLVKKNNFFGGSGKREPGWDNFYKPKKENRWWINAIHKALT | |
| | ELSQNKGKRVILLPAMRTSITCPKCKYCDSKNRNGEKFNCLKC | |
| | GIELNADIDVATENLATVAITAQSMPKPTCERSGDAKKPVRAR | |
| | KAKAPEFHDKLAPSYTVVLREAVKGRRPRKRPARQKRKRNS | |
| CasPhi.12 | MIKPTVSQFLTPGFKLIRNHSRTAGLKLKNEGEEACKKFVREN | 45 |
| E567A | EIPKDECPNFQGGPAIANIIAKSREFTEWEIYQSSLAIQEVIFTLP | |
| | KDKLPEPILKEEWRAQWLSEHGLDTVPYKEAAGLNLIIKNAVN | |
| | TYKGVQVKVDNKNKNNLAKINRKNEIAKLNGEQEISFEEIKAF | |
| | DDKGYLLQKPSPNKSIYCYQSVSPKPFITSKYHNVNLPEEYIGY | |
| | YRKSNEPIVSPYQFDRLRIPIGEPGYVPKWQYTFLSKKENKRRK | |
| | LSKRIKNVSPILGIICIKKDWCVFDMRGLLRTNHWKKYHKPTD | |
| | SINDLFDYFTGDPVIDTKANVVRFRYKMENGIVNYKPVREKKG | |
| | KELLENICDQNGSCKLATVDVGQNNPVAIGLFELKKVNGELTK | |
| | TLISRHPTPIDFCNKITAYRERYDKLESSIKLDAIKQLTSEQKIEV | |
| | DNYNNNFTPQNTKQIVCSKLNINPNDLPWDKMISGTHFISEKA | |
| | QVSNKSEIYFTSTDKGKTKDVMKSDYKWFQDYKPKLSKEVRD | |
| | ALSDIEWRLRRESLEFNKLSKSREQDARQLANWISSMCDVIGIA | |
| | NLVKKNNFFGGSGKREPGWDNFYKPKKENRWWINAIHKALT | |
| | ELSQNKGKRVILLPAMRTSITCPKCKYCDSKNRNGEKFNCLKC | |
| | GIELNADIDVATENLATVAITAQSMPKPTCERSGDAKKPVRAR | |
| | KAKAPEFHDKLAPSYTVVLREAV | |
| CasPhi.12 | MIKPTVSQFLTPGFKLIRNHSRTAGLKLKNEGEEACKKFVREN | 46 |
| E567Q | EIPKDECPNFQGGPAIANIIAKSREFTEWEIYQSSLAIQEVIFTLP | |
| | KDKLPEPILKEEWRAQWLSEHGLDTVPYKEAAGLNLIIKNAVN | |
| | TYKGVQVKVDNKNKNNLAKINRKNEIAKLNGEQEISFEEIKAF | |
| | DDKGYLLQKPSPNKSIYCYQSVSPKPFITSKYHNVNLPEEYIGY | |
| | YRKSNEPIVSPYQFDRLRIPIGEPGYVPKWQYTFLSKKENKRRK | |
| | LSKRIKNVSPILGIICIKKDWCVFDMRGLLRTNHWKKYHKPTD | |
| | SINDLFDYFTGDPVIDTKANVVRFRYKMENGIVNYKPVREKKG | |
| | KELLENICDQNGSCKLATVDVGQNNPVAIGLFELKKVNGELTK | |
| | TLISRHPTPIDFCNKITAYRERYDKLESSIKLDAIKQLTSEQKIEV | |
| | DNYNNNFTPQNTKQIVCSKLNINPNDLPWDKMISGTHFISEKA | |
| | QVSNKSEIYFTSTDKGKTKDVMKSDYKWFQDYKPKLSKEVRD | |
| | ALSDIEWRLRRESLEFNKLSKSREQDARQLANWISSMCDVIGI | |
| | QNLVKKNNFFGGSGKREPGWDNFYKPKKENRWWINAIHKAL | |
| | TELSQNKGKRVILLPAMRTSITCPKCKYCDSKNRNGEKFNCLK | |
| | CGIELNADIDVATENLATVAITAQSMPKPTCERSGDAKKPVRA | |
| | RKAKAPEFHDKLAPSYTVVLREAV | |
| CasPhi.12 | MIKPTVSQFLTPGFKLIRNHSRTAGLKLKNEGEEACKKFVREN | 54 |
| E109R | EIPKDECPNFQGGPAIANIIAKSREFTEWEIYQSSLAIQEVIFTLP | |
| | KDKLPEPILKEEWRAQWLSRHGLDTVPYKEAAGLNLIIKNAV | |
| | NTYKGVQVKVDNKNKNNLAKINRKNEIAKLNGEQEISFEEIKA | |
| | FDDKGYLLQKPSPNKSIYCYQSVSPKPFITSKYHNVNLPEEYIG | |
| | YYRKSNEPIVSPYQFDRLRIPIGEPGYVPKWQYTFLSKKENKRR | |
| | KLSKRIKNVSPILGIICIKKDWCVFDMRGLLRTNHWKKYHKPT | |
| | DSINDLFDYFTGDPVIDTKANVVRFRYKMENGIVNYKPVREKK | |
| | GKELLENICDQNGSCKLATVDVGQNNPVAIGLFELKKVNGELT | |
| | KTLISRHPTPIDFCNKITAYRERYDKLESSIKLDAIKQLTSEQKIE | |
| | VDNYNNNFTPQNTKQIVCSKLNINPNDLPWDKMISGTHFISEK | |
| | AQVSNKSEIYFTSTDKGKTKDVMKSDYKWFQDYKPKLSKEVR | |
| | DALSDIEWRLRRESLEFNKLSKSREQDARQLANWISSMCDVIGI | |
| | ENLVKKNNFFGGSGKREPGWDNFYKPKKENRWWINAIHKAL | |
| | TELSQNKGKRVILLPAMRTSITCPKCKYCDSKNRNGEKFNCLK | |
| | CGIELNADIDVATENLATVAITAQSMPKPTCERSGDAKKPVRA | |
| | RKAKAPEFHDKLAPSYTVVLREAV | |
| CasPhi.12 | MIKPTVSQFLTPGFKLIRNHSRTAGLKLKNEGEEACKKFVREN | 55 |
| H208R | EIPKDECPNFQGGPAIANIIAKSREFTEWEIYQSSLAIQEVIFTLP | |
| | KDKLPEPILKEEWRAQWLSEHGLDTVPYKEAAGLNLIIKNAVN | |
| | TYKGVQVKVDNKNKNNLAKINRKNEIAKLNGEQEISFEEIKAF | |
| | DDKGYLLQKPSPNKSIYCYQSVSPKPFITSKYRNVNLPEEYIGY | |
| | YRKSNEPIVSPYQFDRLRIPIGEPGYVPKWQYTFLSKKENKRRK | |
| | LSKRIKNVSPILGIICIKKDWCVFDMRGLLRTNHWKKYHKPTD | |
| | SINDLFDYFTGDPVIDTKANVVRFRYKMENGIVNYKPVREKKG | |
| | KELLENICDQNGSCKLATVDVGQNNPVAIGLFELKKVNGELTK | |
| | TLISRHPTPIDFCNKITAYRERYDKLESSIKLDAIKQLTSEQKIEV | |
| | DNYNNNFTPQNTKQIVCSKLNINPNDLPWDKMISGTHFISEKA | |
| | QVSNKSEIYFTSTDKGKTKDVMKSDYKWFQDYKPKLSKEVRD | |
| | ALSDIEWRLRRESLEFNKLSKSREQDARQLANWISSMCDVIGIE | |
| | NLVKKNNFFGGSGKREPGWDNFYKPKKENRWWINAIHKALT | |
| | ELSQNKGKRVILLPAMRTSITCPKCKYCDSKNRNGEKFNCLKC | |
| | GIELNADIDVATENLATVAITAQSMPKPTCERSGDAKKPVRAR | |
| | KAKAPEFHDKLAPSYTVVLREAV | |
| CasPhi.12 | MIKPTVSQFLTPGFKLIRNHSRTAGLKLKNEGEEACKKFVREN | 56 |
| K184R | EIPKDECPNFQGGPAIANIIAKSREFTEWEIYQSSLAIQEVIFTLP | |
| | KDKLPEPILKEEWRAQWLSEHGLDTVPYKEAAGLNLIIKNAVN | |
| | TYKGVQVKVDNKNKNNLAKINRKNEIAKLNGEQEISFEEIKAF | |
| | DDKGYLLQRPSPNKSIYCYQSVSPKPFITSKYHNVNLPEEYIGY | |
| | YRKSNEPIVSPYQFDRLRIPIGEPGYVPKWQYTFLSKKENKRRK | |
| | LSKRIKNVSPILGIICIKKDWCVFDMRGLLRTNHWKKYHKPTD | |
| | SINDLFDYFTGDPVIDTKANVVRFRYKMENGIVNYKPVREKKG | |
| | KELLENICDQNGSCKLATVDVGQNNPVAIGLFELKKVNGELTK | |
| | TLISRHPTPIDFCNKITAYRERYDKLESSIKLDAIKQLTSEQKIEV | |
| | DNYNNNFTPQNTKQIVCSKLNINPNDLPWDKMISGTHFISEKA | |
| | QVSNKSEIYFTSTDKGKTKDVMKSDYKWFQDYKPKLSKEVRD | |
| | ALSDIEWRLRRESLEFNKLSKSREQDARQLANWISSMCDVIGIE | |
| | NLVKKNNFFGGSGKREPGWDNFYKPKKENRWWINAIHKALT | |
| | ELSQNKGKRVILLPAMRTSITCPKCKYCDSKNRNGEKFNCLKC | |
| | GIELNADIDVATENLATVAITAQSMPKPTCERSGDAKKPVRAR | |
| | KAKAPEFHDKLAPSYTVVLREAV | |
| CasPhi.12 | MIKPTVSQFLTPGFKLIRNHSRTAGLKLKNEGEEACKRFVREN | 57 |
| K38R | EIPKDECPNFQGGPAIANIIAKSREFTEWEIYQSSLAIQEVIFTLP | |
| | KDKLPEPILKEEWRAQWLSEHGLDTVPYKEAAGLNLIIKNAVN | |
| | TYKGVQVKVDNKNKNNLAKINRKNEIAKLNGEQEISFEEIKAF | |
| | DDKGYLLQKPSPNKSIYCYQSVSPKPFITSKYHNVNLPEEYIGY | |
| | YRKSNEPIVSPYQFDRLRIPIGEPGYVPKWQYTFLSKKENKRRK | |
| | LSKRIKNVSPILGIICIKKDWCVFDMRGLLRTNHWKKYHKPTD | |
| | SINDLFDYFTGDPVIDTKANVVRFRYKMENGIVNYKPVREKKG | |
| | KELLENICDQNGSCKLATVDVGQNNPVAIGLFELKKVNGELTK | |
| | TLISRHPTPIDFCNKITAYRERYDKLESSIKLDAIKQLTSEQKIEV | |
| | DNYNNNFTPQNTKQIVCSKLNINPNDLPWDKMISGTHFISEKA | |
| | QVSNKSEIYFTSTDKGKTKDVMKSDYKWFQDYKPKLSKEVRD | |
| | ALSDIEWRLRRESLEFNKLSKSREQDARQLANWISSMCDVIGIE | |
| | NLVKKNNFFGGSGKREPGWDNFYKPKKENRWWINAIHKALT | |
| | ELSQNKGKRVILLPAMRTSITCPKCKYCDSKNRNGEKFNCLKC | |
| | GIELNADIDVATENLATVAITAQSMPKPTCERSGDAKKPVRAR | |
| | KAKAPEFHDKLAPSYTVVLREAV | |
| CasPhi.12 | MIKPTVSQFLTPGFKLIRNHSRTAGLKLKNEGEEACKKFVREN | 58 |
| L182R | EIPKDECPNFQGGPAIANIIAKSREFTEWEIYQSSLAIQEVIFTLP | |
| | KDKLPEPILKEEWRAQWLSEHGLDTVPYKEAAGLNLIIKNAVN | |
| | TYKGVQVKVDNKNKNNLAKINRKNEIAKLNGEQEISFEEIKAF | |
| | DDKGYLRQKPSPNKSIYCYQSVSPKPFITSKYHNVNLPEEYIGY | |
| | YRKSNEPIVSPYQFDRLRIPIGEPGYVPKWQYTFLSKKENKRRK | |
| | LSKRIKNVSPILGIICIKKDWCVFDMRGLLRTNHWKKYHKPTD | |
| | SINDLFDYFTGDPVIDTKANVVRFRYKMENGIVNYKPVREKKG | |
| | KELLENICDQNGSCKLATVDVGQNNPVAIGLFELKKVNGELTK | |
| | TLISRHPTPIDFCNKITAYRERYDKLESSIKLDAIKQLTSEQKIEV | |
| | DNYNNNFTPQNTKQIVCSKLNINPNDLPWDKMISGTHFISEKA | |
| | QVSNKSEIYFTSTDKGKTKDVMKSDYKWFQDYKPKLSKEVRD | |
| | ALSDIEWRLRRESLEFNKLSKSREQDARQLANWISSMCDVIGIE | |
| | NLVKKNNFFGGSGKREPGWDNFYKPKKENRWWINAIHKALT | |
| | ELSQNKGKRVILLPAMRTSITCPKCKYCDSKNRNGEKFNCLKC | |
| | GIELNADIDVATENLATVAITAQSMPKPTCERSGDAKKPVRAR | |
| | KAKAPEFHDKLAPSYTVVLREAV | |
| CasPhi.12 | MIKPTVSQFLTPGFKLIRNHSRTAGLKLKNEGEEACKKFVREN | 59 |
| Q183R | EIPKDECPNFQGGPAIANIIAKSREFTEWEIYQSSLAIQEVIFTLP | |
| | KDKLPEPILKEEWRAQWLSEHGLDTVPYKEAAGLNLIIKNAVN | |
| | TYKGVQVKVDNKNKNNLAKINRKNEIAKLNGEQEISFEEIKAF | |
| | DDKGYLLRKPSPNKSIYCYQSVSPKPFITSKYHNVNLPEEYIGY | |
| | YRKSNEPIVSPYQFDRLRIPIGEPGYVPKWQYTFLSKKENKRRK | |
| | LSKRIKNVSPILGIICIKKDWCVFDMRGLLRTNHWKKYHKPTD | |
| | SINDLFDYFTGDPVIDTKANVVRFRYKMENGIVNYKPVREKKG | |
| | KELLENICDQNGSCKLATVDVGQNNPVAIGLFELKKVNGELTK | |
| | TLISRHPTPIDFCNKITAYRERYDKLESSIKLDAIKQLTSEQKIEV | |
| | DNYNNNFTPQNTKQIVCSKLNINPNDLPWDKMISGTHFISEKA | |
| | QVSNKSEIYFTSTDKGKTKDVMKSDYKWFQDYKPKLSKEVRD | |
| | ALSDIEWRLRRESLEFNKLSKSREQDARQLANWISSMCDVIGIE | |
| | NLVKKNNFFGGSGKREPGWDNFYKPKKENRWWINAIHKALT | |
| | ELSQNKGKRVILLPAMRTSITCPKCKYCDSKNRNGEKFNCLKC | |
| | GIELNADIDVATENLATVAITAQSMPKPTCERSGDAKKPVRAR | |
| | KAKAPEFHDKLAPSYTVVLREAV | |
| CasPhi.12 | MIKPTVSQFLTPGFKLIRNHSRTAGLKLKNEGEEACKKFVREN | 60 |
| S108R | EIPKDECPNFQGGPAIANIIAKSREFTEWEIYQSSLAIQEVIFTLP | |
| | KDKLPEPILKEEWRAQWLREHGLDTVPYKEAAGLNLIIKNAV | |
| | NTYKGVQVKVDNKNKNNLAKINRKNEIAKLNGEQEISFEEIKA | |
| | FDDKGYLLQKPSPNKSIYCYQSVSPKPFITSKYHNVNLPEEYIG | |
| | YYRKSNEPIVSPYQFDRLRIPIGEPGYVPKWQYTFLSKKENKRR | |
| | KLSKRIKNVSPILGIICIKKDWCVFDMRGLLRTNHWKKYHKPT | |
| | DSINDLFDYFTGDPVIDTKANVVRFRYKMENGIVNYKPVREKK | |
| | GKELLENICDQNGSCKLATVDVGQNNPVAIGLFELKKVNGELT | |
| | KTLISRHPTPIDFCNKITAYRERYDKLESSIKLDAIKQLTSEQKIE | |
| | VDNYNNNFTPQNTKQIVCSKLNINPNDLPWDKMISGTHFISEK | |
| | AQVSNKSEIYFTSTDKGKTKDVMKSDYKWFQDYKPKLSKEVR | |
| | DALSDIEWRLRRESLEFNKLSKSREQDARQLANWISSMCDVIGI | |
| | ENLVKKNNFFGGSGKREPGWDNFYKPKKENRWWINAIHKAL | |
| | TELSQNKGKRVILLPAMRTSITCPKCKYCDSKNRNGEKFNCLK | |
| | CGIELNADIDVATENLATVAITAQSMPKPTCERSGDAKKPVRA | |
| | RKAKAPEFHDKLAPSYTVVLREAV | |
| CasPhi.12 | MIKPTVSQFLTPGFKLIRNHSRTAGLKLKNEGEEACKKFVREN | 61 |
| S198R | EIPKDECPNFQGGPAIANIIAKSREFTEWEIYQSSLAIQEVIFTLP | |
| | KDKLPEPILKEEWRAQWLSEHGLDTVPYKEAAGLNLIIKNAVN | |
| | TYKGVQVKVDNKNKNNLAKINRKNEIAKLNGEQEISFEEIKAF | |
| | DDKGYLLQKPSPNKSIYCYQSVRPKPFITSKYHNVNLPEEYIGY | |
| | YRKSNEPIVSPYQFDRLRIPIGEPGYVPKWQYTFLSKKENKRRK | |
| | LSKRIKNVSPILGIICIKKDWCVFDMRGLLRTNHWKKYHKPTD | |
| | SINDLFDYFTGDPVIDTKANVVRFRYKMENGIVNYKPVREKKG | |
| | KELLENICDQNGSCKLATVDVGQNNPVAIGLFELKKVNGELTK | |
| | TLISRHPTPIDFCNKITAYRERYDKLESSIKLDAIKQLTSEQKIEV | |
| | DNYNNNFTPQNTKQIVCSKLNINPNDLPWDKMISGTHFISEKA | |
| | QVSNKSEIYFTSTDKGKTKDVMKSDYKWFQDYKPKLSKEVRD | |
| | ALSDIEWRLRRESLEFNKLSKSREQDARQLANWISSMCDVIGIE | |
| | NLVKKNNFFGGSGKREPGWDNFYKPKKENRWWINAIHKALT | |
| | ELSQNKGKRVILLPAMRTSITCPKCKYCDSKNRNGEKFNCLKC | |
| | GIELNADIDVATENLATVAITAQSMPKPTCERSGDAKKPVRAR | |
| | KAKAPEFHDKLAPSYTVVLREAV | |
| CasPhi.12 | MIKPTVSQFLTPGFKLIRNHSRTAGLKLKNEGEEACKKFVREN | 62 |
| T114R | EIPKDECPNFQGGPAIANIIAKSREFTEWEIYQSSLAIQEVIFTLP | |
| | KDKLPEPILKEEWRAQWLSEHGLDRVPYKEAAGLNLIIKNAV | |
| | NTYKGVQVKVDNKNKNNLAKINRKNEIAKLNGEQEISFEEIKA | |
| | FDDKGYLLQKPSPNKSIYCYQSVSPKPFITSKYHNVNLPEEYIG | |
| | YYRKSNEPIVSPYQFDRLRIPIGEPGYVPKWQYTFLSKKENKRR | |
| | KLSKRIKNVSPILGIICIKKDWCVFDMRGLLRTNHWKKYHKPT | |
| | DSINDLFDYFTGDPVIDTKANVVRFRYKMENGIVNYKPVREKK | |
| | GKELLENICDQNGSCKLATVDVGQNNPVAIGLFELKKVNGELT | |
| | KTLISRHPTPIDFCNKITAYRERYDKLESSIKLDAIKQLTSEQKIE | |
| | VDNYNNNFTPQNTKQIVCSKLNINPNDLPWDKMISGTHFISEK | |
| | AQVSNKSEIYFTSTDKGKTKDVMKSDYKWFQDYKPKLSKEVR | |
| | DALSDIEWRLRRESLEFNKLSKSREQDARQLANWISSMCDVIGI | |
| | ENLVKKNNFFGGSGKREPGWDNFYKPKKENRWWINAIHKAL | |
| | TELSQNKGKRVILLPAMRTSITCPKCKYCDSKNRNGEKFNCLK | |
| | CGIELNADIDVATENLATVAITAQSMPKPTCERSGDAKKPVRA | |
| | RKAKAPEFHDKLAPSYTVVLREAV | |
| CasPhi.12 | MIKPTVSQFLTPGFKLIRNHSRTAGLKLKNEGEEACKKFVREN | 63 |
| D369A | EIPKDECPNFQGGPAIANIIAKSREFTEWEIYQSSLAIQEVIFTLP | |
| | KDKLPEPILKEEWRAQWLSEHGLDTVPYKEAAGLNLIIKNAVN | |
| | TYKGVQVKVDNKNKNNLAKINRKNEIAKLNGEQEISFEEIKAF | |
| | DDKGYLLQKPSPNKSIYCYQSVSPKPFITSKYHNVNLPEEYIGY | |
| | YRKSNEPIVSPYQFDRLRIPIGEPGYVPKWQYTFLSKKENKRRK | |
| | LSKRIKNVSPILGIICIKKDWCVFDMRGLLRTNHWKKYHKPTD | |
| | SINDLFDYFTGDPVIDTKANVVRFRYKMENGIVNYKPVREKKG | |
| | KELLENICDQNGSCKLATVAVGQNNPVAIGLFELKKVNGELTK | |
| | TLISRHPTPIDFCNKITAYRERYDKLESSIKLDAIKQLTSEQKIEV | |
| | DNYNNNFTPQNTKQIVCSKLNINPNDLPWDKMISGTHFISEKA | |
| | QVSNKSEIYFTSTDKGKTKDVMKSDYKWFQDYKPKLSKEVRD | |
| | ALSDIEWRLRRESLEFNKLSKSREQDARQLANWISSMCDVIGIE | |
| | NLVKKNNFFGGSGKREPGWDNFYKPKKENRWWINAIHKALT | |
| | ELSQNKGKRVILLPAMRTSITCPKCKYCDSKNRNGEKFNCLKC | |
| | GIELNADIDVATENLATVAITAQSMPKPTCERSGDAKKPVRAR | |
| | KAKAPEFHDKLAPSYTVVLREAV | |
| CasPhi.12 | MIKPTVSQFLTPGFKLIRNHSRTAGLKLKNEGEEACKKFVREN | 64 |
| D369N | EIPKDECPNFQGGPAIANIIAKSREFTEWEIYQSSLAIQEVIFTLP | |
| | KDKLPEPILKEEWRAQWLSEHGLDTVPYKEAAGLNLIIKNAVN | |
| | TYKGVQVKVDNKNKNNLAKINRKNEIAKLNGEQEISFEEIKAF | |
| | DDKGYLLQKPSPNKSIYCYQSVSPKPFITSKYHNVNLPEEYIGY | |
| | YRKSNEPIVSPYQFDRLRIPIGEPGYVPKWQYTFLSKKENKRRK | |
| | LSKRIKNVSPILGIICIKKDWCVFDMRGLLRTNHWKKYHKPTD | |
| | SINDLFDYFTGDPVIDTKANVVRFRYKMENGIVNYKPVREKKG | |
| | KELLENICDQNGSCKLATVNVGQNNPVAIGLFELKKVNGELTK | |
| | TLISRHPTPIDFCNKITAYRERYDKLESSIKLDAIKQLTSEQKIEV | |
| | DNYNNNFTPQNTKQIVCSKLNINPNDLPWDKMISGTHFISEKA | |
| | QVSNKSEIYFTSTDKGKTKDVMKSDYKWFQDYKPKLSKEVRD | |
| | ALSDIEWRLRRESLEFNKLSKSREQDARQLANWISSMCDVIGIE | |
| | NLVKKNNFFGGSGKREPGWDNFYKPKKENRWWINAIHKALT | |
| | ELSQNKGKRVILLPAMRTSITCPKCKYCDSKNRNGEKFNCLKC | |
| | GIELNADIDVATENLATVAITAQSMPKPTCERSGDAKKPVRAR | |
| | KAKAPEFHDKLAPSYTVVLREAV | |
| CasPhi.12 | MIKPTVSQFLTPGFKLIRNHSRTAGLKLKNEGEEACKKFVREN | 65 |
| D658A | EIPKDECPNFQGGPAIANIIAKSREFTEWEIYQSSLAIQEVIFTLP | |
| | KDKLPEPILKEEWRAQWLSEHGLDTVPYKEAAGLNLIIKNAVN | |
| | TYKGVQVKVDNKNKNNLAKINRKNEIAKLNGEQEISFEEIKAF | |
| | DDKGYLLQKPSPNKSIYCYQSVSPKPFITSKYHNVNLPEEYIGY | |
| | YRKSNEPIVSPYQFDRLRIPIGEPGYVPKWQYTFLSKKENKRRK | |
| | LSKRIKNVSPILGIICIKKDWCVFDMRGLLRTNHWKKYHKPTD | |
| | SINDLFDYFTGDPVIDTKANVVRFRYKMENGIVNYKPVREKKG | |
| | KELLENICDQNGSCKLATVDVGQNNPVAIGLFELKKVNGELTK | |
| | TLISRHPTPIDFCNKITAYRERYDKLESSIKLDAIKQLTSEQKIEV | |
| | DNYNNNFTPQNTKQIVCSKLNINPNDLPWDKMISGTHFISEKA | |
| | QVSNKSEIYFTSTDKGKTKDVMKSDYKWFQDYKPKLSKEVRD | |
| | ALSDIEWRLRRESLEFNKLSKSREQDARQLANWISSMCDVIGIE | |
| | NLVKKNNFFGGSGKREPGWDNFYKPKKENRWWINAIHKALT | |
| | ELSQNKGKRVILLPAMRTSITCPKCKYCDSKNRNGEKFNCLKC | |
| | GIELNAAIDVATENLATVAITAQSMPKPTCERSGDAKKPVRAR | |
| | KAKAPEFHDKLAPSYTVVLREAV | |
| CasPhi.12 | MIKPTVSQFLTPGFKLIRNHSRTAGLKLKNEGEEACKKFVREN | 66 |
| D658N | EIPKDECPNFQGGPAIANIIAKSREFTEWEIYQSSLAIQEVIFTLP | |
| | KDKLPEPILKEEWRAQWLSEHGLDTVPYKEAAGLNLIIKNAVN | |
| | TYKGVQVKVDNKNKNNLAKINRKNEIAKLNGEQEISFEEIKAF | |
| | DDKGYLLQKPSPNKSIYCYQSVSPKPFITSKYHNVNLPEEYIGY | |
| | YRKSNEPIVSPYQFDRLRIPIGEPGYVPKWQYTFLSKKENKRRK | |
| | LSKRIKNVSPILGIICIKKDWCVFDMRGLLRTNHWKKYHKPTD | |
| | SINDLFDYFTGDPVIDTKANVVRFRYKMENGIVNYKPVREKKG | |
| | KELLENICDQNGSCKLATVDVGQNNPVAIGLFELKKVNGELTK | |
| | TLISRHPTPIDFCNKITAYRERYDKLESSIKLDAIKQLTSEQKIEV | |
| | DNYNNNFTPQNTKQIVCSKLNINPNDLPWDKMISGTHFISEKA | |
| | QVSNKSEIYFTSTDKGKTKDVMKSDYKWFQDYKPKLSKEVRD | |
| | ALSDIEWRLRRESLEFNKLSKSREQDARQLANWISSMCDVIGIE | |
| | NLVKKNNFFGGSGKREPGWDNFYKPKKENRWWINAIHKALT | |
| | ELSQNKGKRVILLPAMRTSITCPKCKYCDSKNRNGEKFNCLKC | |
| | GIELNANIDVATENLATVAITAQSMPKPTCERSGDAKKPVRAR | |
| | KAKAPEFHDKLAPSYTVVLREAV | |
| CasPhi | MIKPTVSQFLTPGFKLIRNHSRTAGLKLKNEGEEACKKFVREN | 203 |
| j12_L17_ | EIPKDECPNFQGGPAIANIIAKSREFTEWEIYQSSLAIQEVIFTLP | |
| 18_del1 | KDKLPEPILKEEWRAQWLSEHGLDTVPYKEAAGLNLIIKNAVN | |
| | TYKGVQVKVDNKNKNNLAKINRKNEIAKLNGEQEISFEEIKAF | |
| | DDKGYLLQKPSPNKSIYCYQSVSPKPFITSKYHNVNLPEEYIGY | |
| | YRKSNEPIVSPYQFDRLRIPIGEPGYVPKWQYTFLSKKENKRRK | |
| | LSKRIKNVSPILGIICIKKDWCVFDMRGLLRTNHWKKYHKPTD | |
| | SINDLFDYFTGDPVIDTKANVVRFRYKMENGIVNYKPVREKKG | |
| | KELLENICDQNGSCKLATVDVGQNNPVAIGLFELKKVNGELTK | |
| | TLISRHPTPIDFCNKITAYRERYDKLESSIKLDAIKQLTSEQKIEV | |
| | DNYNNNFTPQNTKQIVCSKLNINPNDLPWDKMISGTHFISEKA | |
| | QGSSGDYKWFQDYKPKLSKEVRDALSDIEWRLRRESLEFNKL | |
| | SKSREQDARQLANWISSMCDVIGIENLVKKNNFFGGSGKREPG | |
| | WDNFYKPKKENRWWINAIHKALTELSQNKGKRVILLPAMRTS | |
| | ITCPKCKYCDSKNRNGEKFNCLKCGIELNADIDVATENLATVA | |
| | ITAQSMPKPTCERSGDAKKPVRARKAKAPEFHDKLAPSYTVVL | |
| | REAV | |
| CasPhi | MIKPTVSQFLTPGFKLIRNHSRTAGLKLKNEGEEACKKFVREN | 204 |
| j12_L17_ | EIPKDECPNFQGGPAIANIIAKSREFTEWEIYQSSLAIQEVIFTLP | |
| 18_del2 | KDKLPEPILKEEWRAQWLSEHGLDTVPYKEAAGLNLIIKNAVN | |
| | TYKGVQVKVDNKNKNNLAKINRKNEIAKLNGEQEISFEEIKAF | |
| | DDKGYLLQKPSPNKSIYCYQSVSPKPFITSKYHNVNLPEEYIGY | |
| | YRKSNEPIVSPYQFDRLRIPIGEPGYVPKWQYTFLSKKENKRRK | |
| | LSKRIKNVSPILGIICIKKDWCVFDMRGLLRTNHWKKYHKPTD | |
| | SINDLFDYFTGDPVIDTKANVVRFRYKMENGIVNYKPVREKKG | |
| | KELLENICDQNGSCKLATVDVGQNNPVAIGLFELKKVNGELTK | |
| | TLISRHPTPIDFCNKITAYRERYDKLESSIKLDAIKQLTSEQKIEV | |
| | DNYNNNFTPQNTKQIVCSKLNINPNDLPWDKMISGTHFISEKA | |
| | QVSNKSEGSSGDYKWFQDYKPKLSKEVRDALSDIEWRLRRES | |
| | LEFNKLSKSREQDARQLANWISSMCDVIGIENLVKKNNFFGGS | |
| | GKREPGWDNFYKPKKENRWWINAIHKALTELSQNKGKRVILL | |
| | PAMRTSITCPKCKYCDSKNRNGEKFNCLKCGIELNADIDVATE | |
| | NLATVAITAQSMPKPTCERSGDAKKPVRARKAKAPEFHDKLA | |
| | PSYTVVLREAV | |
| CasPhi.12- | MIKPTVSQFLTPGFKLIRNHSRTAGKKLKNEGEEACKKFVREN | 794 |
| L26K- | EIPKDECPNFQGGPAIANIIAKSREFTEWEIYQSSLAIQEVIFTLP | |
| E567Q | KDKLPEPILKEEWRAQWLSEHGLDTVPYKEAAGLNLIIKNAVN | |
| | TYKGVQVKVDNKNKNNLAKINRKNEIAKLNGEQEISFEEIKAF | |
| | DDKGYLLQKPSPNKSIYCYQSVSPKPFITSKYHNVNLPEEYIGY | |
| | YRKSNEPIVSPYQFDRLRIPIGEPGYVPKWQYTFLSKKENKRRK | |
| | LSKRIKNVSPILGIICIKKDWCVFDMRGLLRTNHWKKYHKPTD | |
| | SINDLFDYFTGDPVIDTKANVVRFRYKMENGIVNYKPVREKKG | |
| | KELLENICDQNGSCKLATVDVGQNNPVAIGLFELKKVNGELTK | |
| | TLISRHPTPIDFCNKITAYRERYDKLESSIKLDAIKQLTSEQKIEV | |
| | DNYNNNFTPQNTKQIVCSKLNINPNDLPWDKMISGTHFISEKA | |
| | QVSNKSEIYFTSTDKGKTKDVMKSDYKWFQDYKPKLSKEVRD | |
| | ALSDIEWRLRRESLEFNKLSKSREQDARQLANWISSMCDVIGIQ | |
| | NLVKKNNFFGGSGKREPGWDNFYKPKKENRWWINAIHKALT | |
| | ELSQNKGKRVILLPAMRTSITCPKCKYCDSKNRNGEKFNCLKC | |
| | GIELNADIDVATENLATVAITAQSMPKPTCERSGDAKKPVRAR | |
| | KAKAPEFHDKLAPSYTVVLREAV | |
| CasPhi.12- | MIKPTVSQFLTPGFKLIRNHSRTAGRKLKNEGEEACKKFVREN | 2090 |
| L26R- | EIPKDECPNFQGGPAIANIIAKSREFTEWEIYQSSLAIQEVIFTLP | |
| I471T | KDKLPEPILKEEWRAQWLSEHGLDTVPYKEAAGLNLIIKNAVN | |
| | TYKGVQVKVDNKNKNNLAKINRKNEIAKLNGEQEISFEEIKAF | |
| | DDKGYLLQKPSPNKSIYCYQSVSPKPFITSKYHNVNLPEEYIGY | |
| | YRKSNEPIVSPYQFDRLRIPIGEPGYVPKWQYTFLSKKENKRRK | |
| | LSKRIKNVSPILGIICIKKDWCVFDMRGLLRTNHWKKYHKPTD | |
| | SINDLFDYFTGDPVIDTKANVVRFRYKMENGIVNYKPVREKKG | |
| | KELLENICDQNGSCKLATVDVGQNNPVAIGLFELKKVNGELTK | |
| | TLISRHPTPIDFCNKITAYRERYDKLESSIKLDAIKQLTSEQKIEV | |
| | DNYNNNFTPQNTKQIVCSKLNINPNDLPWDKMTSGTHFISEKA | |
| | QVSNKSEIYFTSTDKGKTKDVMKSDYKWFQDYKPKLSKEVRD | |
| | ALSDIEWRLRRESLEFNKLSKSREQDARQLANWISSMCDVIGIE | |
| | NLVKKNNFFGGSGKREPGWDNFYKPKKENRWWINAIHKALT | |
| | ELSQNKGKRVILLPAMRTSITCPKCKYCDSKNRNGEKFNCLKC | |
| | GIELNADIDVATENLATVAITAQSMPKPTCERSGDAKKPVRAR | |
| | KAKAPEFHDKLAPSYTVVLREAV | |
| CasPhi.12- | MIKPTVSQFLTPGFKLIRNHSRTAGLKLKNEGEEACKKFVREN | 2091 |
| I471T | EIPKDECPNFQGGPAIANIIAKSREFTEWEIYQSSLAIQEVIFTLP | |
| | KDKLPEPILKEEWRAQWLSEHGLDTVPYKEAAGLNLIIKNAVN | |
| | TYKGVQVKVDNKNKNNLAKINRKNEIAKLNGEQEISFEEIKAF | |
| | DDKGYLLQKPSPNKSIYCYQSVSPKPFITSKYHNVNLPEEYIGY | |
| | YRKSNEPIVSPYQFDRLRIPIGEPGYVPKWQYTFLSKKENKRRK | |
| | LSKRIKNVSPILGIICIKKDWCVFDMRGLLRTNHWKKYHKPTD | |
| | SINDLFDYFTGDPVIDTKANVVRFRYKMENGIVNYKPVREKKG | |
| | KELLENICDQNGSCKLATVDVGQNNPVAIGLFELKKVNGELTK | |
| | TLISRHPTPIDFCNKITAYRERYDKLESSIKLDAIKQLTSEQKIEV | |
| | DNYNNNFTPQNTKQIVCSKLNINPNDLPWDKMTSGTHFISEKA | |
| | QVSNKSEIYFTSTDKGKTKDVMKSDYKWFQDYKPKLSKEVRD | |
| | ALSDIEWRLRRESLEFNKLSKSREQDARQLANWISSMCDVIGIE | |
| | NLVKKNNFFGGSGKREPGWDNFYKPKKENRWWINAIHKALT | |
| | ELSQNKGKRVILLPAMRTSITCPKCKYCDSKNRNGEKFNCLKC | |
| | GIELNADIDVATENLATVAITAQSMPKPTCERSGDAKKPVRAR | |
| | KAKAPEFHDKLAPSYTVVLREAV | |

TABLE 19
Exemplary Amino Acid Alterations Relative to SEQ ID NO: 32

| Effects | Amino Acid Alterations |
|---|---|
| | At least one substitution (i.e., with R, K or H) selected from I2, T5, K15, |
| | R18, H20, S21, L26, N30, E33, E34, A35, K37, K38, R41, N43, Q54, |
| | Q79R, K92E, K99R, S108, E109, H110, G111, D113, T114, P116, K118, |
| | E119, A121, N132, K135, Q138, V139, N148, L149, E157, E164, E166, |
| | E170, Y180, L182, Q183, K184, S186, K189, S196, S198, K200, I203, |
| | S205, K206, Y207, H208, N209, Y220, S223, E258, K281, K348, N355, |
| | S362, N406, K435, I471, I489, Y490, F491, D495, K496, K498, K500, |
| | D501, V502, K504, S505, D506, V521, E567, N568, S579, Q612, S638, |
| | F701, and P707 |
| Enhanced nuclease | T5R, L26R, L26K, A121Q, N148R, V139R, S198R, H208R, S223P, |
| activity relative to | E258K, N355R, I471T, S579R, F701R, P707R, K189P, S638K, Q54R, |
| the wild-type | Q79R, Y220S, N406K, E119S, K92E, K435Q, N568D, and V521T |
| effector protein | Double mutations: L26K/A121Q, L26X/A121Q, K99R/L149R, |
| | K99R/N148R, L149R/H208R, S362R/L26X L26X/N148R, L26X/H208R, |
| | N30R/N148R, L26X/K99R, L26X/P707R, L26X/L149R, L26X/N30R, |
| | L26X/N355R, L26X/K281R, L26X/S108R, L26X/K348R, T5R/V139R, |
| | I2R/V139R, K99R/S186R, L26X/A673G, L26X/Q674R, S579R/L26K, |
| | F701R/E258K, T5R/L26K, L26X/K435Q, L26X/G685R, L26X/Q674K, |
| | L26X/P699R, L26X/T70E, L26X/Q232R, L26X/T252R, L26X/E567Q, |
| | L26X/P679R, L26X/E83K, L26X/E73P, L26X/K248E, L26X, |
| | T5R/S223P, S579R/S223P, L26X/S223P, T5R/A121Q, L26X/A696R, |
| | S198R/I471T, L26X/N153R, L26X/E682R, L26X/D703R, Q612R/L26K, |
| | L26X/I471T, K348R/L26K, S579R/I471T, L26X/V228R, |
| | T5R/S638K, S579R/K189P, S579R/E258K, L26X/K260R, L26X/S638K, |
| | S579R/Y220S, T5R/I471T, L26X/F233R, L26X/V521T, F701R/A121Q, |
| | L26X/G361R, S198R/E258K, L26X/S472R, T5R/Y220S, L26X/A150K, |
| | L26X/S684R, L26X/B157R, L26X/K248R, F701R/L26K, S198R/N406K, |
| | S198R/Y220S, S198R/S638K, S198R/V521T, S579R/A121Q, |
| | K348R/Y220S, S198R/K189P, L26X/E242R, L26X/K678R, |
| | T5R/N406K, L26X/1158K, T5R/V521T, L26X/N259R, L26X/K257R, |
| | L26X/K256R, T5R/K189P, L26X/C405R, S579R/V521T, S579R/N406K, |
| | T5R/K92E, TSR/I258K, L26X/I97R, S579R/S638K, T5R/K435Q, |
| | F701R/S638K, L26X/L236R, F701R/I471T, Q612R/S223P, |
| | F701R/S223P, S198R/E119S, S579R/K92E, L26X/E715R, |
| | Q612R/I471T, F701R/Y220S, S198R/S223P, and L26X/K266R, wherein |
| | X is selected from R and K. |
| Nickase activity | E157A, E164A, E164L, E166A, E1661, E170A, I489A, I489S, Y490S, |
| | Y490A, F491A, F491S, F491G, D495G, D495R, D495K, K496A, |
| | K496S, K498A, K498S, K500A, K500S, D501R, D501G, D501K, |
| | V502A, V502S, K504A, K504S, S505R, D506A; |
| | deletion of S478-S505 of SEQ ID NO: 32; |
| | deletion of S478-S505 of SEQ ID NO: 32 and insertion of the sequence of |
| | SDLYIERGGDPRDVHQQVETKPKGKRKSEIRILKIR (SEQ ID NO: |
| | 205); |
| | deletion of S478-S505 of SEQ ID NO: 32 and insertion of the sequence of |
| | SDYIVDHGGDPEKVFFETKSKKDKTKRYKRR (SEQ ID NO: 206); |
| | an amino acid sequence that is at least 90%, at least 95%, at least 97%, at |
| | least 98%, at least 99% identical, or is 100% identical to SEQ ID NO: |
| | 203; |
| | an amino acid sequence that is at least 90%, at least 95%, at least 97%, at |
| | least 98%, at least 99% identical, or is 100% identical to SEQ ID NO: |
| | 204 |
| Reduced or | D369A, D369N, D658A, D658N, E567A, E567Q |
| abolished nuclease | |
| activity relative to | |
| the wild-type | |
| effector protein | |

[0252] In certain embodiments, compositions comprise an effector protein an engineered guide nucleic acid, wherein the amino acid sequence of the effector protein comprises at least about 200, at least about 220, at least about 240, at least about 260, at least about 280, at least about 300, at least about 320, at least about 340, at least about 360, at least about 380, at least about 400, at least about 420, at least about 440, at least about 460, at least about 480, at least about 500, at least about 520, at least about 540, at least about 560, at least about 580, at least about 600, at least about 620, at least about 640, at least about 660, at least about 680, at least about 700, or at least about 717 contiguous amino acids or more of any one of the sequences as set forth in TABLES 15-19. In certain embodiments, compositions comprise an effector protein and an engineered guide nucleic acid, wherein the amino acid sequence of the effector protein comprises at least about 200 contiguous amino acids or more of any one of the sequences as set forth in TABLES 15-19. In certain embodiments, compositions comprise an effector protein and an engineered guide nucleic acid, wherein the amino acid sequence of the effector protein comprises at least about 300 contiguous amino acids or more of any one of the sequences as set forth in TABLES 15-19. In certain embodiments, compositions comprise an effector protein and an engineered guide nucleic acid, wherein the amino acid sequence of the effector protein comprises at least about 700 contiguous amino acids or more of any one of the sequences as set forth in TABLES 15-19.

[0253] In some embodiments, compositions, systems, and methods described herein comprise an effector protein or a nucleic acid encoding the effector protein, wherein the effector protein comprises one or more amino acid alterations relative to the sequence recited in TABLES 15-19. In some embodiments, the effector protein comprising one or more amino acid alterations is a variant of an effector protein described herein. It is understood that any reference to an effector protein herein also refers to an effector protein variant as described herein. In some embodiments, an amino acid alteration comprises a deletion of an amino acid. In some embodiments, an amino acid alteration comprises an insertion of an amino acid. In some embodiments, an amino acid alteration comprises a conservative amino acid substitution. In some embodiments, an amino acid alteration comprises a non-conservative amino acid substitution. In some embodiments, one or more amino acid alterations comprises a combination of one or more conservative amino acid substitutions and one or more non-conservative amino acid substitutions. When describing a conservative amino acid substitution herein, reference is made to the replacement of one amino acid for another such that the replacement takes place within a family of amino acids that are related in their side chains. Conversely, when describing a non-conservative alteration (e.g., non-conservative substitution), reference is made to the replacement of one amino acid residue for another that does not have a related side chain. It is understood that genetically encoded amino acids can be divided into four families having related side chains: (1) acidic (negatively charged): Asp (D), Glu (E); (2) basic (positively charged): Lys (K), Arg (R), His (H); (3) non-polar (hydrophobic): Cys (C), Ala (A), Val (V), Leu (L), Ile (I), Pro (P), Phe (F), Met (M), Trp (W), Gly (G), Tyr (Y), with non-polar also being subdivided into: (i) strongly hydrophobic: Ala (A), Val (V), Leu (L), Ile (I), Met (M), Phe (F); and (ii) moderately hydrophobic: Gly (G), Pro (P), Cys (C), Tyr (Y), Trp (W); and (4) uncharged polar: Asn (N), Gln (Q), Ser (S), Thr (T). Amino acids may be related by aliphatic side chains: Gly (G), Ala (A), Val (V), Leu (L), Ile (I), Ser (S), Thr (T), with Ser (S) and Thr (T) optionally being grouped separately as aliphatic-hydroxyl. Amino acids may be related by aromatic side chains: Phe (F), Tyr (Y), Trp (W). Amino acids may be related by amide side chains: Asn (N), Gln (Q). Amino acids may be related by sulfur-containing side chains: Cys (C) and Met (M).

[0254] In some embodiments, an effector protein comprises an amino acid sequence that is at least 65%, at least 70%, at least 75%, at least 80%, at least 85%, at least 90%, at least 95%, at least 97%, or at least 98%, at least 99%, or 100% identical to a sequence selected from TABLES 15-19, wherein the effector protein comprises 1, 2, 3, 4, 5, 6, 7, 8, 9 or 10 conservative amino acid substitutions relative to the sequence selected from TABLES 15-19. In some embodiments, an effector protein comprises an amino acid sequence that is at least 65%, at least 70%, at least 75%, at least 80%, at least 85%, at least 90%, at least 95%, at least 97%, or at least 98%, at least 99%, or 100% identical to a sequence selected from TABLES 15-19, wherein the effector protein comprises 1 to 10, 10 to 20, 20 to 30, or 30 to 40 conservative amino acid substitutions relative to the sequence selected from TABLES 15-19. In some embodiments, an effector protein comprises an amino acid sequence that is at least 65%, at least 70%, at least 75%, at least 80%, at least 85%, at least 90%, at least 95%, at least 97%, or at least 98%, at least 99%, or 100% identical to a sequence selected from TABLES 15-19, wherein the effector protein comprises not more than 1, 2, 3, 4, 5, 6, 7, 8, 9 or 10 non-conservative amino acid substitutions relative to the sequence selected from TABLES 15-19.

[0255] In certain embodiments, compositions, systems, and methods described herein comprise an effector protein, or a nucleic acid encoding the effector protein, wherein the effector protein comprises an amino acid sequence that is at least 65%, at least 70%, at least 75%, at least 80%, at least 85%, at least 90%, at least 95%, at least 98%, at least 99%, or 100% similar to any one of the sequences selected from TABLES 15-19. An amino acid sequence of the effector protein is similar to the reference amino acid sequence, when a value that is calculated by dividing a similarity score by the length of the alignment. The similarity of two amino acid sequences can be calculated by using a BLOSUM62 similarity matrix (Henikoff and Henikoff, Proc. Natl. Acad. Sci. USA., 89:10915-10919 (1992)) that is transformed so that any value ≥1 is replaced with +1 and any value ≤0 is replaced with 0. For example, an Ile (I) to Leu (L) substitution is scored at +2.0 by the BLOSUM62 similarity matrix, which in the transformed matrix is scored at +1. This transformation allows the calculation of percent similarity, rather than a similarity score. Alternately, when comparing two full protein sequences, the proteins can be aligned using pairwise MUSCLE alignment. Then, the % similarity can be scored at each residue and divided by the length of the alignment. For determining % similarity over a protein domain or motif, a multilevel consensus sequence (or PROSITE motif sequence) can be used to identify how strongly each domain or motif is conserved. In calculating the similarity of a domain or motif, the second and third levels of the multilevel sequence are treated as equivalent to the top level. Additionally, if a substitution could be treated as conservative with any of the amino acids in that position of the multilevel consensus sequence, +1 point is assigned. For example, given the multilevel consensus sequence: RLG and YCK, the test sequence QIq would receive three points. This is because in the transformed BLOSUM62 matrix, each combination is scored as: Q-R: +1; Q-Y: +0; I-L: +1; I-C: +0; Q-G: +0; Q-K: +1. For each position, the highest score is used when calculating similarity. The % similarity can also be calculated using commercially available programs, such as the Geneious Prime software given the parameters matrix=BLOSUM62 and threshold ≥1.

[0256] In some cases, the effector proteins comprise a RuvC domain. In some embodiments, the RuvC domain may be defined by a single, contiguous sequence, or a set of RuvC subdomains that are not contiguous with respect to the primary amino acid sequence of the protein. An effector protein of the present disclosure may include multiple RuvC subdomains, which may combine to generate a RuvC domain with substrate binding or catalytic activity. For example, an effector protein may include three RuvC subdomains (RuvC-I, RuvC-II, and RuvC-III) that are not contiguous with respect to the primary amino acid sequence of the effector protein but form a RuvC domain once the protein is produced and folds. In many cases, effector proteins comprise a recognition domain with a binding affinity for a guide nucleic acid or for a guide nucleic acid-target nucleic acid heteroduplex. An effector protein may comprise a zinc finger domain.

[0257] An effector protein may be small, which may be beneficial for nucleic acid detection or editing (for example, the effector protein may be less likely to adsorb to a surface or another biological species due to its small size). The smaller nature of these effector proteins may allow for them to be more easily packaged and delivered with higher efficiency in the context of genome editing and more readily incorporated as a reagent in an assay. In some embodiments, the length of the effector protein is less than 400 linked amino acid residues. In some embodiments, the length of the effector protein is less than 425 linked amino acid residues. In some embodiments, the length of the effector protein is less than 450 linked amino acid residues. In some embodiments, the length of the effector protein is less than 475 linked amino acid residues. In some embodiments, the length of the effector protein is less than 500 linked amino acid residues. In some embodiments, the length of the effector protein is less than 550, less than 600, less than 650, less than 700, or less than 717 linked amino acid residues. In some embodiments, the length of the effector protein is less than 500 linked amino acid residues. In some embodiments, the length of the effector protein is about 400 to about 717 linked amino acids. In some embodiments, the length of the effector protein is about 400 to about 700 linked amino acid residues. In some embodiments, the length of the effector protein is about 650 to about 675 linked amino acids.

[0258] In some embodiments, an effect protein is encoded by a nucleic acid sequence that is at least 65%, at least 70%, at least 75%, at least 80%, at least 85%, at least 90%, at least 95%, at least 97%, or at least 98%, or at least 99%, identical to SEQ ID NO: 2092. In some embodiments, the nucleic acid sequence comprises one or more untranslateable regions (UTR), one or more nuclear localization regions, one or more stop codons, and or more adenine bases that are encompassed in a polyA tail. An exemplary nucleic acid sequence is shown in TABLE 20 below (bold=UTR11s, italics=NLS sequences, bold underlined=stop codons, and series of As=polyA tail):

TABLE 20
Exemplary Nuclease mRNA (CasPhi.12 L26R, 1471T)

mRNA Sequence
AGGGUCCCGCAGUCGGCGUCCAGCGGCUCUGCUUGUUCGUGUGUGUGU
CGUUGCAGGCCUUAUUCGGAUCCGCCACCAUGGCCCCAAAGAAGAAGC
GGAAGGUCGGUAUCCACGGAGUCCCAGCAGCCAUCAAACCUACCGUGA
GCCAGUUCCUGACCCCUGGCUUCAAGCUGAUCCGGAACCACAGCCGGA
CCGCUGGCAGAAAGCUUAAGAAUGAAGGCGAGGAAGCCUGCAAAAAGU
UCGUGAGAGAAAACGAGAUCCCUAAGGACGAGUGCCCCAACUUCCAGG
GCGGCCCUGCCAUCGCUAAUAUUAUCGCCAAGAGCAGAGAGUUCACCG
AGUGGGAGAUCUAUCAGAGCAGCCUGGCCAUUCAGGAGGUGAUCUUCA
CGCUGCCAAAGGACAAGCUGCCCGAGCCAAUACUGAAGGAAGAGUGGC
GGGCCCAGUGGCUGUCCGAGCACGGCCUGGAUACCGUGCCAUACAAGG
AGGCCGCGGGCCUGAACCUGAUCAUCAAGAACGCCGUAAACACCUACA
AGGGCGUGCAGGUGAAGGUGGAUAACAAAAACAAGAACAACCUGGCAA
AAAUCAACAGAAAGAACGAGAUCGCCAAGCUGAAUGGCGAGCAGGAGA
UCAGCUUUGAGGAAAUCAAAGCCUUCGACGAUAAGGGCUACCUGCUGC
AGAAACCAUCUCCUAACAAGAGCAUCUAUUGUUACCAGAGCGUGAGCC
CCAAGCCUUUCAUCACAAGCAAGUACCACAACGUGAACCUGCCCGAGG
AGUACAUCGGCUACUACAGAAAGUCUAAUGAGCCUAUCGUGAGCCCUU
ACCAGUUUGACAGACUGCGGAUCCCUAUCGGCGAACCCGGAUAUGUGC
CUAAGUGGCAGUACACCUUCCUGUCUAAAAAGGAAAACAAGCGGAGAA
AGCUGUCCAAGCGCAUCAAGAACGUGAGCCCCAUCCUGGGCAUCAUCU
GUAUCAAGAAAGACUGGUGCGUUUUUGACAUGCGCGGCCUGCUGAGAA
CAAACCACUGGAAGAAGUACCAUAAGCCUACAGAUAGCAUUAACGACC
UGUUUGAUUAUUUCACCGGCGACCCUGUGAUCGACACAAAGGCCAACG
UCGUGAGAUUCAGGUACAAGAUGGAAAAUGGAAUCGUGAACUACAAGC
CAGUCAGAGAGAAGAAGGGCAAGGAACUGCUGGAAAAUAUCUGCGAUC
AGAACGGUAGCUGCAAGCUGGCCACAGUGGACGUGGGCCAGAACAACC
CCGUGGCCAUCGGACUGUUCGAGCUCAAGAAGGUCAAUGGUGAGCUGA
CCAAGACACUGAUCUCUCGGCACCCCACACCUAUCGACUUCUGUAACA
AAAUCACCGCCUACCGGGAGAGAUACGACAAGCUGGAAAGCAGCAUCA
AACUCGACGCCAUCAAGCAGCUGACAUCUGAGCAGAAGAUCGAGGUGG
ACAACUACAACAAUAACUUCACCCCUCAGAACACCAAGCAAAUCGUGU
GCAGCAAGCUGAACAUUAACCCUAACGAUCUGCCUUGGGAUAAGAUGA
CCAGCGGCACACACUUCAUCUCUGAAAAGGCUCAGGUGAGCAACAAGU
CUGAAAUCUACUUUACCAGCACCGACAAGGGCAAGACCAAAGACGUGA
UGAAGUCCGAUUACAAGUGGUUCCAAGACUACAAGCCUAAACUGAGCA
AAGAGGUGAGAGAUGCCCUGAGCGACAUUGAGUGGCGCCUGCGGCGGG
AAUCUCUGGAAUUUAACAAACUUUCCAAGAGCAGAGAGCAAGACGCUA
GACAGCUGGCCAAUUGGAUCAGCAGCAUGUGCGAUGUGAUCGGCAUCG
AGAACCUGGUGAAGAAAAACAAUUUUUUCGGCGGAUCUGGCAAACGGG
AACCUGGAUGGGACAACUUCUACAAGCCCAAAAAGGAAAACAGAUGGU
GGAUCAACGCCAUCCACAAAGCCCUGACCGAGCUGAGCCAGAACAAGG
GCAAGAGAGUGAUCCUGCUGCCCGCCAUGAGAACCAGCAUCACCUGCC
CUAAAUGCAAGUACUGCGACAGCAAAAACAGAAACGGCGAAAAGUUCA
AUUGCCUGAAGUGUGGAAUCGAGCUGAACGCUGACAUCGAUGUGGCAA
CCGAAAACCUGGCUACAGUUGCCAUCACCGCCCAAUCCAUGCCUAAAC
CCACAUGUGAAAGGUCCGGCGACGCCAAGAAGCCUGUGAGAGCCAGAA
AGGCCAAGGCUCCUGAGUUCCACGACAAACUGGCCCCUAGCUACACCG
UGGUGCUGAGAGAGGCCGUGAAAAGGCCGGCGGCCACGAAAAAGGCCG
GCCAGGCAAAAAAGAAAAAGUAAUGACCAUCACAUUUAAAAGCAUCUC
AGCCUACCAUGAGAAUAAGAGAAAGAAAAUGAAGAUCAAUAGCUUAUU
CAUCUCUUUUUCUUUUUCGUUGGUGUAAAGCCAACACCCUGUCUAAAA
AACAUAAAUUUCUUUAAUCAUUUUGCCUCUUUUCUCUGUGCUUCAAUU
AAUAAAAAAUGGAAAGAACCUCGAGAAAAAAAAAAAAAAAAAAAAAAA
AAAAAAAAAAAAAAAAAAAAAAAAAAAAAAAAAAAAAAAAAAAAAAAA
AAAAAAAAAAAAAAAAAAAAAAAAAAAAAAAAAAAAAAAAAAAAAAAA
A
(SEQ ID NO: 2092)

### Protospacer Adjacent Motif (PAM) Sequences

[0259] Effector proteins of the present disclosure, dimers thereof, and multimeric complexes thereof may cleave or nick a target nucleic acid within or near a protospacer adjacent motif (PAM) sequence of the target nucleic acid. In some embodiments, cleavage occurs within 10, 20, 30, 40 or 50 nucleotides of a 5′ or 3′ terminus of a PAM sequence. In some embodiments, cleavage occurs within 1, 2, 3, 4, 5, 6, 7, 8, 9 or 10 nucleotides of a 5′ or 3′ terminus of a PAM sequence. A target nucleic acid may comprise a PAM sequence adjacent to a target sequence. In some embodiments, systems, compositions, and methods comprise a guide nucleic acid or use thereof, wherein the guide nucleic acid comprises a spacer sequence that is complementary to a target sequence that is adjacent to a PAM sequence.

[0260] In some embodiments, systems, compositions, and methods comprise a guide nucleic acid or use thereof, wherein the guide nucleic acid comprises a spacer sequence that is complementary to a target sequence that is adjacent to a PAM sequence. A target nucleic acid may comprise a PAM sequence adjacent to a target sequence.

[0261] In some embodiments, the PAM is 5′-NTTN-3′, wherein N=any nucleic acid. Exemplary PAM sequences are disclosed in TABLE 21. In some embodiments, the effector protein recognizes a PAM sequence comprising any of the following nucleotide sequences as set forth in TABLE 21. In some embodiments, the effector protein comprises an amino acid sequence that is at least 65%, at least 70%, at least 75%, at least 80%, at least 85%, at least 90%, at least 95%, at least 97%, or at least 98%, at least 99%, or 100% identical to a sequence selected from TABLES 15, 18, and 19. In some embodiments, the effector protein comprises an amino acid sequence that is at least 65%, at least 70%, at least 75%, at least 80%, at least 85%, at least 90%, at least 95%, at least 97%, or at least 98%, at least 99%, or 100% identical to SEQ ID NO: 32.

TABLE 21
Exemplary PAM NTTN Sequences

| PAM # | PAM Sequence (5′-3′) |
|---|---|
| 1 | NTTG |
| 2 | NTTC |
| 3 | NTTT |
| 4 | NTTA |

[0262] In some embodiments, the PAM is 5′-NNTN-3′, wherein N=any nucleic acid. In some embodiments, the PAM is 5′-TNTR-3′, wherein N=any nucleic acid and wherein R=a purine nucleic acid (i.e., A or G). Non-limiting examples of TNTR PAM sequences are disclosed in TABLE 22. In some embodiments, the PAM is 5′-TNTG-3.′ In some embodiments, the effector protein recognizes a PAM sequence comprising any of the following nucleotide sequences as set forth in TABLE 22. In some embodiments, the effector protein comprises an amino acid sequence that is at least 65%, at least 70%, at least 75%, at least 80%, at least 85%, at least 90%, at least 95%, at least 97%, or at least 98%, at least 99%, or 100% identical to a sequence selected from TABLES 15-17. In some embodiments, the effector protein comprises an amino acid sequence that is at least 65%, at least 70%, at least 75%, at least 80%, at least 85%, at least 90%, at least 95%, at least 97%, or at least 98%, at least 99%, or 100% identical to SEQ ID NO: 773.

TABLE 22
Exemplary PAM TNTR Sequences

| PAM # | PAM Sequence (5′-3′) |
|---|---|
| 1 | TTTG |
| 2 | TCTG |
| 3 | TGTG |
| 4 | TCTA |
| 5 | TATA |
| 6 | TTTA |
| 7 | TGTA |
| 8 | TATG |

[0263] Non-limiting examples of NNTN PAMs include GGTG, AGTG, GATG, CATG, GGTG, and CCTG. A non-limiting example of a guide that targets a PAM of TCTG has a spacer sequence of SEQ ID NO: 2018. A non-limiting example of a guide that targets a PAM of GGTG has a spacer sequence of SEQ ID NO: 2019. A non-limiting example of a guide that targets a PAM of AGTG has a spacer sequence of SEQ ID NO: 2020. A non-limiting example of a guide that targets a PAM of GATG has a spacer sequence of SEQ ID NO: 2021. A non-limiting example of a guide that targets a PAM of CATG has a spacer sequence of SEQ ID NO: 2022. A non-limiting example of a guide that targets a PAM of TCTA has a spacer sequence of SEQ ID NO: 2023. A non-limiting example of a guide that targets a PAM of GGTG has a spacer sequence of SEQ ID NO: 2024. A non-limiting example of a guide that targets a PAM of CCTG has a spacer sequence of SEQ ID NO: 2025. Another non-limiting example of a guide that targets a PAM of CCTG has a spacer sequence of SEQ ID NO: 2026.

### Nuclease-Dead Effector Proteins

[0264] In some embodiments, the effector protein may comprise an enzymatically inactive and/or “dead” (abbreviated by “d”) effector protein in combination (e.g., fusion) with a polypeptide comprising recombinase activity. In some embodiments, nuclease-dead effector protein may also be referred to as a catalytically inactive effector protein. Although an effector protein normally has nuclease activity, in some embodiments, an effector protein does not have nuclease activity. In some embodiments, an effector protein comprising a nuclease-dead effector protein, wherein the nuclease-dead effector protein comprising an amino acid sequence that is at least 60%, at least 65%, at least 70%, at least 75%, at least 80%, at least 85%, at least 90%, at least 92%, at least 95%, at least 97%, at least 98%, at least 99%, or 100% identical to any one of the sequences recited in TABLES 15-19. In some embodiments, the effector protein comprising an amino acid sequence that is at least 60%, at least 65%, at least 70%, at least 75%, at least 80%, at least 85%, at least 90%, at least 92%, at least 95%, at least 97%, at least 98%, at least 99%, or 100% identical to any one of the sequences recited in TABLES 15-19, wherein the effector protein is modified or engineered to be a nuclease-dead effector protein.

[0265] Catalytically inactive effector proteins may comprise a modified form of a wildtype counterpart. The modified form of the wildtype counterpart may comprise an amino acid change (e.g., deletion, insertion, or substitution) that reduces the nucleic acid-cleaving activity of the effector protein. In such embodiments, the catalytically inactive effector protein may also be referred to as a catalytically reduced effector protein. For example, a nuclease domain (e.g., HEPN domain, RuvC domain) of an effector protein can be deleted or mutated so that it is no longer functional or comprises reduced nuclease activity. The modified form of the effector protein may have less than 90%, less than 80%, less than 70%, less than 60%, less than 50%, less than 40%, less than 30%, less than 20%, less than 10%, less than 5%, or less than 1% of the nucleic acid-cleaving activity of the wild-type counterpart. The modified form of an effector protein may have no substantial nucleic acid-cleaving activity. When an effector protein is a modified form that has no substantial nucleic acid-cleaving activity, it may be referred to as enzymatically inactive and/or dead. A dead effector polypeptide (e.g., catalytically inactive effector protein) may bind to a target nucleic acid but may not cleave the target nucleic acid. A dead effector polypeptide (e.g., catalytically inactive effector protein) may associate with a guide nucleic acid to activate or repress transcription of a target nucleic acid.

[0266] In some embodiments, a nuclease-dead effector protein comprises an amino acid sequence that is at least 60%, at least 65%, at least 70%, at least 75%, at least 80%, at least 85%, at least 90%, at least 92%, at least 95%, at least 97%, at least 98%, or at least 99% identical to SEQ ID NO: 32, and wherein the effector protein further comprises one or more alterations selected from D369A, D369N, E567A, E567Q, D658A and D658N. In some embodiments, a nuclease-dead effector protein comprises an amino acid sequence that is at least 60%, at least 65%, at least 70%, at least 75%, at least 80%, at least 85%, at least 90%, at least 92%, at least 95%, at least 97%, at least 98%, at least 99%, or 100% similar to SEQ ID NO: 32, and wherein the effector protein further comprises one or more alterations selected from D369A, D369N, E567A, E567Q, D658A and D658N.

[0267] In certain embodiments, the amino acid sequence of the dCas protein is based on SEQ ID NO: 32 and is modified at position 369. In some embodiments, the modification at position 369 is from aspartic acid to alanine (D369A). In some embodiments, the amino acid sequence of the dCas protein is at least 95%, 96%, 97%, 98%, or 99% identical to SEQ ID NO: 63. In some embodiments, the amino acid sequence of the dCas protein comprises or consists of SEQ ID NO: 63. In certain embodiments, the amino acid sequence of the dCas protein is based on SEQ ID NO: 32 and is modified at position 369. In some embodiments, the modification at position 369 is from aspartic acid to asparagine (D369N). In some embodiments, the amino acid sequence of the dCas protein is at least 95%, 96%, 97%, 98%, or 99% identical to SEQ ID NO: 64. In some embodiments, the amino acid sequence of the dCas protein comprises or consists of SEQ ID NO: 64.

In certain embodiments, the amino acid sequence of the dCas protein is based on SEQ ID NO: 32 and is modified at position 658. In some embodiments, the modification at position 658 is from aspartic acid to alanine (D658A). In some embodiments, the amino acid sequence of the dCas protein is at least 95%, 96%, 97%, 98%, or 99% identical to SEQ ID NO: 65. In some embodiments, the amino acid sequence of the dCas protein comprises or consists of SEQ ID NO: 65.

[0268] In certain embodiments, the amino acid sequence of the dCas protein is based on SEQ ID NO: 32 and is modified at position 658. In some embodiments, the modification at position 658 is from aspartic acid to asparagine (D658N). In some embodiments, the amino acid sequence of the dCas protein is at least 95%, 96%, 97%, 98%, or 99% identical to SEQ ID NO: 66. In some embodiments, the amino acid sequence of the dCas protein comprises or consists of SEQ ID NO: 66.

[0269] In certain embodiments, the amino acid sequence of the dCas protein is based on SEQ ID NO: 32 and is modified at position 567. In some embodiments, the modification at position 567 is from glutamine acid to alanine (E567A). In some embodiments, the amino acid sequence of the dCas protein is at least 95%, 96%, 97%, 98%, or 99% identical to SEQ ID NO: 45. In some embodiments, the amino acid sequence of the dCas protein comprises or consists of SEQ ID NO: 45.

[0270] In certain embodiments, the amino acid sequence of the dCas protein is based on SEQ ID NO: 32 and is modified at position 567. In some embodiments, the modification at position 567 is from glutamic acid to glutamine (E567Q). In some embodiments, the amino acid sequence of the dCas protein is at least 95%, 96%, 97%, 98%, or 99% identical to SEQ ID NO: 46. In some embodiments, the amino acid sequence of the dCas protein comprises or consists of SEQ ID NO: 46.

[0271] In some embodiments, a nuclease-dead effector protein comprises an amino acid sequence that is at least 60%, at least 65%, at least 70%, at least 75%, at least 80%, at least 85%, at least 90%, at least 92%, at least 95%, at least 97%, at least 98%, or at least 99% identical to SEQ ID NO: 773, and wherein the effector protein further comprises one or more alterations selected from D237A, D418A, D418N, E335A, and E335Q. In some embodiments, a nuclease-dead effector protein comprises an amino acid sequence that is at least 60%, at least 65%, at least 70%, at least 75%, at least 80%, at least 85%, at least 90%, at least 92%, at least 95%, at least 97%, at least 98%, at least 99%, or 100% similar to SEQ ID NO: 773, and wherein the effector protein further comprises one or more alterations selected from D237A, D418A, D418N, E335A, and E335Q.

[0272] In certain embodiments, the amino acid sequence of the dCas protein is based on SEQ ID NO: 773 and is modified at position 335. In some embodiments, the modification at position 335 is from glutamic acid to glutamine (E335Q). In some embodiments, the amino acid sequence of the dCas protein is at least 95%, 96%, 97%, 98%, or 99% identical to SEQ ID NO: 788. In some embodiments, the amino acid sequence of the dCas protein comprises or consists of SEQ ID NO: 788.

[0273] In certain embodiments, the amino acid sequence of the dCas protein is based on SEQ ID NO: 773 and is modified at position 237. In some embodiments, the modification at position 237 is from aspartic acid to alanine (D237A). In some embodiments, the amino acid sequence of the dCas protein is at least 95%, 96%, 97%, 98%, or 99% identical to SEQ ID NO: 789. In some embodiments, the amino acid sequence of the dCas protein comprises or consists of SEQ ID NO: 789.

[0274] In certain embodiments, the amino acid sequence of the dCas protein is based on SEQ ID NO: 773 and is modified at position 418. In some embodiments, the modification at position 418 is from aspartic acid to alanine (D418A). In some embodiments, the amino acid sequence of the dCas protein is at least 95%, 96%, 97%, 98%, or 99% identical to SEQ ID NO: 790. In some embodiments, the amino acid sequence of the dCas protein comprises or consists of SEQ ID NO: 790.

[0275] In certain embodiments, the amino acid sequence of the dCas protein is based on SEQ ID NO: 773 and is modified at position 418. In some embodiments, the modification at position 418 is from aspartic acid to asparagine (D418N). In some embodiments, the amino acid sequence of the dCas protein is at least 95%, 96%, 97%, 98%, or 99% identical to SEQ ID NO: 791. In some embodiments, the amino acid sequence of the dCas protein comprises or consists of SEQ ID NO: 791.

[0276] In certain embodiments, the amino acid sequence of the dCas protein is based on SEQ ID NO: 773 and is modified at position 335. In some embodiments, the modification at position 335 is from glutamic acid to alanine (E335A). In some embodiments, the amino acid sequence of the dCas protein is at least 95%, 96%, 97%, 98%, or 99% identical to SEQ ID NO: 792. In some embodiments, the amino acid sequence of the dCas protein comprises or consists of SEQ ID NO: 792.

### Fusion Proteins

[0277] In some embodiments, compositions, systems, and methods comprise a fusion protein, a fusion partner, or uses thereof. A fusion protein generally comprises an effector protein and a fusion partner. In some embodiments, the fusion partner comprises a polypeptide or peptide that is linked to the effector protein. In some embodiments, the fusion partner is not linked to the effector protein but is brought into proximity of the effector protein by other means. By way of non-limiting example, a fusion partner protein may comprise a peptide that binds an aptamer of a guide nucleic acid, wherein the effector protein is also capable of binding the guide nucleic acid, the guide nucleic acid thereby bringing the fusion partner into proximity of the effector protein. In some embodiments, the fusion partner is capable of binding or being bound by an effector protein. In some embodiments, the fusion partner and the effector protein are both capable of binding or being bound by an additional protein or moiety, the additional protein or moiety thereby bringing the fusion partner into proximity of the effector protein. In some embodiments, the fusion protein is a heterologous peptide or polypeptide as described herein. In some embodiments, the amino terminus of the fusion partner is linked to the carboxy terminus of the effector protein. In some embodiments, the carboxy terminus of the fusion partner protein is linked to the amino terminus of the effector protein by the linker. In some embodiments, the fusion partner is not an effector protein as described herein. In some embodiments, the fusion partner comprises a second effector protein or a multimeric form thereof. Accordingly, in some embodiments, the fusion protein comprises more than one effector protein. In such embodiments, the fusion protein can comprise at least two effector proteins that are same. In some embodiments, the fusion protein comprises at least two effector proteins that are different. In some embodiments, the multimeric form is a homomeric form. In some embodiments, the multimeric form is a heteromeric form. Unless otherwise indicated, reference to effector proteins throughout the present disclosure include fusion proteins comprising the effector protein described herein and a fusion partner.

[0278] In some embodiments, a fusion partner imparts some function or activity to a fusion protein that is not provided by an effector protein. Such activities may include but are not limited to nuclease activity, methyltransferase activity, demethylase activity, DNA repair activity, DNA damage activity, deamination activity, dismutase activity, alkylation activity, depurination activity, oxidation activity, dimer forming activity (e.g., pyrimidine dimer forming activity), integrase activity, transposase activity, recombinase activity, polymerase activity, ligase activity, helicase activity, photolyase activity, glycosylase activity, acetyltransferase activity, deacetylase activity, kinase activity, phosphatase activity, ubiquitin ligase activity, deubiquitinating activity, adenylation activity, deadenylation activity, SUMOylating activity, deSUMOylating activity, ribosylation activity, deribosylation activity, myristoylation activity or demyristoylation activity, modification of a polypeptide associated with target nucleic acid (e.g., a histone), and/or signaling activity.

[0279] In some embodiments, a fusion partner may provide signaling activity. In some embodiments, a fusion partner may inhibit or promote the formation of multimeric complex of an effector protein. In an additional example, the fusion partner may directly or indirectly edit a target nucleic acid. Edits can be of a nucleobase, nucleotide, or nucleotide sequence of a target nucleic acid. In some embodiments, the fusion partner may interact with additional proteins, or functional fragments thereof, to make modifications to a target nucleic acid. In other embodiments, the fusion partner may modify proteins associated with a target nucleic acid. In some embodiments, a fusion partner may modulate transcription (e.g., inhibits transcription, increases transcription) of a target nucleic acid. In yet another example, a fusion partner may directly or indirectly inhibit, reduce, activate or increase expression of a target nucleic acid.

[0280] In some embodiments of the above, the systems and compositions provided herein comprise a fusion protein comprising an effector protein comprising an amino acid sequence that is at least 90% identical to any one of the sequences recited in TABLES 15, 18, and 19, and a guide RNA comprising a repeat sequence that is at least 90% identical to any one of SEQ ID NOs: 16 or 38-43 and a spacer sequence that is at least 90% identical to any one of the sequences recited in TABLES 1, 3, and 5.

[0281] In some embodiments of the above, the systems and compositions provided herein comprise a fusion protein comprising an effector protein comprising an amino acid sequence this is at least 95% identical to any one of the sequences recited in TABLES 15, 18, and 19, and wherein a guide RNA comprising a repeat sequence that is at least 95% to any one of SEQ ID NOs: 16 or 38-43 and a spacer sequence that is at least 95% identical to any one of the sequences recited in TABLES 1, 3, and 5.

[0282] In some embodiments of the above, the systems and compositions provided herein comprise a fusion protein comprising an effector protein comprising any one of the sequences recited in TABLES 15, 18, and 19, and a guide RNA comprising any one of SEQ ID NOs: 16 or 38-43 and any one of the spacer sequences recited in TABLES 1, 3, and 5.

[0283] In some embodiments, the effector protein comprises an amino acid sequence this is at least 90% identical to any one of the sequences of TABLES 15, 18, and 19, and wherein the guide RNA comprises a sequence that is at least 90% identical to any one of the guide RNA sequences of TABLES 8-10.

[0284] In some embodiments of the above, the systems and compositions provided herein comprise a fusion protein comprising an effector protein comprising an amino acid sequence that is at least 95% identical to any one of the sequences of TABLES 15, 18, and 19, and a guide RNA comprising a sequence that is at least 95% identical to any one of the guide RNA sequences of TABLES 8-10.

[0285] In some embodiments of the above, the effector protein comprises any one of the sequences recited in TABLES 15, 18, and 19, and wherein the guide RNA comprises a sequence recited in TABLES 8-10.

[0286] In some embodiments of the above, the systems and compositions provided herein comprise a fusion protein comprising an effector protein comprising an amino acid sequence that is at least 90% identical to any one of the sequences recited in TABLES 15-17, and a guide RNA comprising a repeat sequence that is at least 90% identical to SEQ ID NO: 488 and a spacer sequence that is at least 90% identical to any one of the sequences recited in TABLES 2, 4, and 6.

[0287] In some embodiments of the above, the systems and compositions provided herein comprise a fusion protein comprising an effector protein comprising an amino acid sequence this is at least 95% identical to any one of the sequences recited in TABLES 15-17, and a guide RNA comprising a repeat sequence that is at least 95% identical to SEQ ID NO: 488 and a spacer sequence that is at least 95% identical to any one of the sequences recited in TABLES 2, 4, and 6.

[0288] In some embodiments of the above, the effector protein comprises any one of the sequences recited in TABLES 15-17, and wherein the guide RNA comprises a repeat that is identical to SEQ ID NO: 488 and any one of the spacer sequences recited in TABLES 2, 4, and 6.

[0289] In some embodiments of the above, the systems and compositions provided herein comprise a fusion protein comprising an effector protein comprising an amino acid sequence this is at least 90% identical to any one of the sequences of TABLES 15-17, and a guide RNA comprising a sequence that is at least 90% identical to any one of the guide RNA sequences of TABLEs 11-13.

[0290] In some embodiments of the above, the systems and compositions provided herein comprise a fusion protein comprising an effector protein comprising an amino acid sequence that is at least 95% identical to any one of the sequences of TABLES 15-17, and a guide RNA comprising a sequence that is at least 95% identical to any one of the guide RNA sequences of TABLEs 11-13.

[0291] In some embodiments of the above, the systems and compositions provided herein comprise a fusion protein comprising an effector protein comprising any one of the sequences recited in TABLES 15-17, and a guide RNA comprising a sequence recited in TABLE 11-13.

[0292] In some embodiments of the above, the systems and compositions provided herein comprise a fusion protein comprising an guide RNA comprising at least one sequence that is at least 80%, at least 85%, at least 90%, at least 95% or 100% identical to a sequence selected from any one of TABLES 1, 7, and 8.

[0293] In some embodiments of the above, the systems and compositions provided herein comprise a fusion protein comprising an guide RNA comprising at least one sequence that is at least 80%, at least 85%, at least 90%, at least 95% or 100% identical to a sequence selected from any one of TABLES 3, 7, and 9.

[0294] In some embodiments of the above, the systems and compositions provided herein comprise a fusion protein comprising an guide RNA comprising at least one sequence that is at least 80%, at least 85%, at least 90%, at least 95% or 100% identical to a sequence selected from any one of TABLES 5, 7, and 10.

[0295] In some embodiments of the above, the guide RNA comprises at least one sequence that is at least 80%, at least 85%, at least 90%, at least 95% or 100% identical to a sequence selected from any one of TABLES 2, 7, and 11.

[0296] In some embodiments of the above, the systems and compositions provided herein comprise a fusion protein comprising an guide RNA comprising at least one sequence that is at least 80%, at least 85%, at least 90%, at least 95% or 100% identical to a sequence selected from any one of TABLES 4, 7, and 12.

[0297] In some embodiments of the above, the systems and compositions provided herein comprise a fusion protein comprising an guide RNA comprising at least one sequence that is at least 80%, at least 85%, at least 90%, at least 95% or 100% identical to a sequence selected from any one of TABLES 6, 7, and 13.

[0298] In some embodiments, of the above, the systems and compositions provided herein comprise a fusion protein comprising an effector protein amino acid sequence comprises a nuclear localization signal.

[0299] In some embodiments, of the above, the systems and compositions provided herein comprise a fusion protein comprising an composition further comprises an additional guide RNA that binds a different portion of the target nucleic acid than the guide RNA.

### Nucleic Acid Modification Activity

[0300] In some embodiments, fusion partners have enzymatic activity that modifies a nucleic acid, such as a target nucleic acid. In some embodiments, the target nucleic acid may comprise or consist of a ssRNA, dsRNA, ssDNA, or a dsDNA. Examples of enzymatic activity that modifies the target nucleic acid include, but are not limited to: nuclease activity, which comprises the enzymatic activity of an enzyme which allows the enzyme to cleave the phosphodiester bonds between the nucleotide subunits of nucleic acids, such as that provided by a restriction enzyme, or a nuclease (e.g., FokI nuclease); methyltransferase activity such as that provided by a methyltransferase (e.g., HhaI DNA m5c-methyltransferase (M.HhaI), DNA methyltransferase 1 (DNMT1), DNA methyltransferase 3a (DNMT3a), DNA methyltransferase 3b (DNMT3b), METI, DRM3 (plants), ZMET2, CMT1, CMT2 (plants)); demethylase activity such as that provided by a demethylase (e.g., Ten-Eleven Translocation (TET) dioxygenase 1 (TET1CD), TET1, DME, DML1, DML2, ROS1); DNA repair activity; DNA damage (e.g., oxygenation) activity; deamination activity such as that provided by a deaminase (e.g., a cytosine deaminase enzyme such as rat APOBEC1); dismutase activity; alkylation activity; depurination activity; oxidation activity; pyrimidine dimer forming activity; integrase activity such as that provided by an integrase and/or resolvase (e.g., Gin invertase such as the hyperactive mutant of the Gin invertase, GinH106Y, human immunodeficiency virus type 1 integrase (IN), Tn3 resolvase); transposase activity; recombinase activity such as that provided by a recombinase (e.g., catalytic domain of Gin recombinase); polymerase activity; ligase activity; helicase activity; photolyase activity; and glycosylase activity.

[0301] In some embodiments, fusion partners target a ssRNA, dsRNA, ssDNA, or a dsDNA. In some embodiments, fusion partners target ssRNA. Non-limiting examples of fusion partners for targeting ssRNA include, but are not limited to, splicing factors (e.g., RS domains); protein translation components (e.g., translation initiation, elongation, and/or release factors; e.g., eIF4G); RNA methylases; RNA editing enzymes (e.g., RNA deaminases, e.g., adenosine deaminase acting on RNA (ADAR), including A to I and/or C to U editing enzymes); helicases; and RNA-binding proteins.

[0302] It is understood that a fusion partner may include an entire protein, or in some embodiments, may include a fragment of the protein (e.g., a functional domain). In some embodiments, the functional domain binds or interacts with a nucleic acid, such as ssRNA, including intramolecular and/or intermolecular secondary structures thereof (e.g., hairpins, stem-loops, etc.). The functional domain may interact transiently or irreversibly, directly, or indirectly. In some embodiments, a functional domain comprises a region of one or more amino acids in a protein that is required for an activity of the protein, or the full extent of that activity, as measured in an in vitro assay. Activities include but are not limited to nucleic acid binding, nucleic acid editing, nucleic acid mutating, nucleic acid modifying, nucleic acid cleaving, protein binding or combinations thereof. The absence of the functional domain, including mutations of the functional domain, would abolish or reduce activity.

[0303] Accordingly, fusion partners may comprise a protein or domain thereof selected from: endonucleases (e.g., RNase III, the CRR22 DYW domain, Dicer, and PIN (PilT N-terminus); SMG5 and SMG6; domains responsible for stimulating RNA cleavage (e.g., CPSF, CstF, CFIm and CFIIm); exonucleases such as XRN-1 or Exonuclease T; deadenylases such as HNT3; protein domains responsible for nonsense mediated RNA decay (e.g., UPF1, UPF2, UPF3, UPF3b, RNP S1, Y14, DEK, REF2, and SRml60); protein domains responsible for stabilizing RNA (e.g., PABP); proteins and protein domains responsible for polyadenylation of RNA (e.g., PAP1, GLD-2, and Star-PAP); proteins and protein domains responsible for polyuridinylation of RNA (e.g., CID1 and terminal uridylate transferase); and other suitable domains that affect nucleic acid modifications.

[0304] In some embodiments, an effector protein is a fusion protein, wherein the effector protein is linked to a chromatin-modifying enzyme. In some embodiments, the fusion protein chemically modifies a target nucleic acid, for example by methylating, demethylating, or acetylating the target nucleic acid in a sequence specific or non-specific manner.

### Base Editors

[0305] In some embodiments, fusion partners edit a nucleobase of a target nucleic acid. Fusion proteins comprising such a fusion partner and an effector protein may be referred to as base editors. Such a fusion partner may be referred to as a base editing enzyme. In some embodiments, a base editor comprises a base editing enzyme variant that differs from a naturally occurring base editing enzyme, but it is understood that any reference to a base editing enzyme herein also refers to a base editing enzyme variant. In some embodiments, a base editor may be a fusion protein comprising a base editing enzyme linked to an effector protein. In some embodiments, the amino terminus of the fusion partner protein is linked to the carboxy terminus of the effector protein by the linker. In some embodiments, the carboxy terminus of the fusion partner protein is linked to the amino terminus of the effector protein by the linker. The base editor may be functional when the effector protein is coupled to a guide nucleic acid. The base editor may be functional when the effector protein is coupled to a guide nucleic acid. The guide nucleic acid imparts sequence specific activity to the base editor. By way of non-limiting example, the effector protein may comprise a catalytically inactive effector protein (e.g., a catalytically inactive variant of an effector protein described herein). Also, by way of non-limiting example, the base editing enzyme may comprise deaminase activity. Additional base editors are described herein.

[0306] In some embodiments, base editors are capable of catalyzing editing (e.g., a chemical modification) of a nucleobase of a nucleic acid molecule, such as DNA or RNA (single stranded or double stranded). In some embodiments, a base editing enzyme, and therefore a base editor, is capable of converting an existing nucleobase to a different nucleobase, such as: an adenine (A) to guanine (G); cytosine (C) to thymine (T); cytosine (C) to guanine (G); uracil (U) to cytosine (C); guanine (G) to adenine (A); hydrolytic deamination of an adenine or adenosine, or methylation of cytosine (e.g., CpG, CpA, CpT or CpC). In some embodiments, base editors edit a nucleobase on a ssDNA. In some embodiments, base editors edit a nucleobase on both strands of dsDNA. In some embodiments, base editors edit a nucleobase of an RNA.

[0307] In some embodiments, a base editing enzyme itself may or may not bind to the nucleic acid molecule containing the nucleobase. In some embodiments, upon binding to its target locus in the target nucleic acid (e.g., a DNA molecule), base pairing between the guide nucleic acid and target strand leads to displacement of a small segment of ssDNA in an “R-loop”. In some embodiments, DNA bases within the R-loop are edited by the base editor having the deaminase enzyme activity. In some embodiments, base editors for improved efficiency in eukaryotic cells comprise a catalytically inactive effector protein that may generate a nick in the non-edited strand, inducing repair of the non-edited strand using the edited strand as a template.

[0308] In some embodiments, a base editing enzyme comprises a deaminase enzyme. Exemplary deaminases are described in US20210198330, WO2021041945, WO2021050571A1, and WO2020123887, all of which are incorporated herein by reference in their entirety. Exemplary deaminase domains are described WO2018027078 and WO2017070632, and each are hereby incorporated in its entirety by reference. Also, additional exemplary deaminase domains are described in Komor et al., Nature, 533, 420-424 (2016); Gaudelli et al., Nature, 551, 464-471 (2017); Komor et al., Science Advances, 3:eaao4774 (2017), and Rees et al., Nat Rev Genet. 2018 December; 19(12):770-788. doi: 10.1038/s41576-018-0059-1, which are hereby incorporated by reference in their entirety. In some embodiments, the deaminase functions as a monomer. In some embodiments, the deaminase functions as heterodimer with an additional protein. In some embodiments, base editors comprise a DNA glycosylase inhibitor (e.g., an uracil glycosylase inhibitor (UGI) or uracil N-glycosylase (UNG)). In some embodiments, the fusion partner is a deaminase, e.g., ADAR1/2, ADAR-2, AID, or any function variant thereof.

[0309] In some embodiments, a base editor is a cytosine base editor (CBE). In some embodiments, the CBE may convert a cytosine to a thymine. In some embodiments, a cytosine base editing enzyme may accept ssDNA as a substrate but may not be capable of cleaving dsDNA, as it is linked to a catalytically inactive effector protein. In some embodiments, when bound to its cognate DNA, the catalytically inactive effector protein of the CBE may perform local denaturation of the DNA duplex to generate an R-loop in which the DNA strand not paired with a guide nucleic acid exists as a disordered single-stranded bubble. In some embodiments, the catalytically inactive effector protein generated ssDNA R-loop may enable the CBE to perform efficient and localized cytosine deamination in vitro. In some embodiments, deamination activity is exhibited in a window of about 4 to about 10 base pairs. In some embodiments, fusion to the catalytically inactive effector protein presents a target site to the cytosine base editing enzyme in high effective molarity, which may enable the CBE to deaminate cytosines located in a variety of different sequence motifs, with differing efficacies. In some embodiments, the CBE is capable of mediating RNA-programmed deamination of target cytosines in vitro or in vivo. In some embodiments, the cytosine base editing enzyme is a cytidine deaminase. In some embodiments, the cytosine base editing enzyme is a cytosine base editing enzyme described by Koblan et al. (2018) Nature Biotechnology 36:848-846; Komor et al. (2016) Nature 533:420-424; Koblan et al. (2021) “Efficient C⋅G-to-G⋅C base editors developed using CRISPRi screens, target-library analysis, and machine learning,” Nature Biotechnology; Kurt et al. (2021) Nature Biotechnology 39:41-46; Zhao et al. (2021) Nature Biotechnology 39:35-40; and Chen et al. (2021) Nature Communications 12:1384, all incorporated herein by reference.

[0310] In some embodiments, CBEs comprise a uracil glycosylase inhibitor (UGI) or uracil N-glycosylase (UNG). In some embodiments, base excision repair (BER) of U⋅G in DNA is initiated by a UNG, which recognizes a U⋅G mismatch and cleaves the glyosidic bond between a uracil and a deoxyribose backbone of DNA. In some embodiments, BER results in the reversion of the U⋅G intermediate created by the first CBE back to a C⋅G base pair. In some embodiments, the UNG may be inhibited by fusion of a UGI. In some embodiments, the CBE comprises a UGI. In some embodiments, a C-terminus of the CBE comprises the UGI. In some embodiments, the UGI is a small protein from bacteriophage PBS. In some embodiments, the UGI is a DNA mimic that potently inhibits both human and bacterial UNG. In some embodiments, the UGI inhibitor is any protein or polypeptide that inhibits UNG. In some embodiments, the CBE may mediate efficient base editing in bacterial cells and moderately efficient editing in mammalian cells, enabling conversion of a C⋅G base pair to a T⋅A base pair through a U⋅G intermediate. In some embodiments, the CBE is modified to increase base editing efficiency while editing more than one strand of DNA.

[0311] In some embodiments, a CBE nicks a non-edited DNA strand. In some embodiments, the non-edited DNA strand nicked by the CBE biases cellular repair of a U⋅G mismatch to favor a U⋅A outcome, elevating base editing efficiency. In some embodiments, a APOBEC1-nickase-UGI fusion efficiently edits in mammalian cells, while minimizing frequency of non-target indels. In some embodiments, base editors do not comprise a functional fragment of the base editing enzyme. In some embodiments, base editors do not comprise a function fragment of a UGI, where such a fragment may be capable of excising a uracil residue from DNA by cleaving an N-glycosidic bond.

[0312] In some embodiments, the fusion protein further comprises a non-protein uracil-DNA glycosylase inhibitor (npUGI). In some embodiments, the npUGI is selected from a group of small molecule inhibitors of uracil-DNA glycosylase (UDG), or a nucleic acid inhibitor of UDG. In some embodiments, the npUGI is a small molecule derived from uracil. Examples of small molecule non-protein uracil-DNA glycosylase inhibitors, fusion proteins, and Cas-CRISPR systems comprising base editing activity are described in WO2021087246, which is incorporated by reference in its entirety.

[0313] In some embodiments, a cytosine base editing enzyme, and therefore a cytosine base editor, is a cytidine deaminase. In some embodiments, the cytidine deaminase base editor is generated by ancestral sequence reconstruction as described in WO2019226953, which is hereby incorporated by reference in its entirety. Non-limiting exemplary cytidine deaminases suitable for use with effector proteins described herein include: APOBEC1, APOBEC2, APOBEC3C, APOBEC3D, APOBEC3F, APOBEC3G, APOBEC3H, APOBEC4, APOBEC3A, BE1 (APOBEC1-XTEN-dCas9), BE2 (APOBEC1-XTEN-dCas9-UGI), BE3 (APOBEC1-XTEN-dCas9(A840H)-UGI), BE3-Gam, saBE3, saBE4-Gam, BE4, BE4-Gam, saBE4, and saBE4-Gam as described in WO2021163587, WO2021087246, WO2021062227, and WO2020123887, which are incorporated herein by reference in their entirety.

[0314] In some embodiments, a base editor is a cytosine to guanine base editor (CGBE). A CGBE may convert a cytosine to a guanine.

[0315] In some embodiments, a base editor is an adenine base editor (ABE). An ABE may convert an adenine to a guanine. In some embodiments, an ABE converts an A⋅T base pair to a G⋅C base pair. In some embodiments, the ABE converts a target A⋅T base pair to G⋅C in vivo or in vitro. In some embodiments, ABEs provided herein reverse spontaneous cytosine deamination, which has been linked to pathogenic point mutations. In some embodiments, ABEs provided herein enable correction of pathogenic SNPs (˜47% of disease-associated point mutations). In some embodiments, the adenine comprises exocyclic amine that has been deaminated (e.g., resulting in altering its base pairing preferences). In some embodiments, deamination of adenosine yields inosine. In some embodiments, inosine exhibits the base-pairing preference of guanine in the context of a polymerase active site, although inosine in the third position of a tRNA anticodon is capable of pairing with A, U, or C in mRNA during translation. Non-limiting exemplary adenine base editing enzymes suitable for use with effector proteins described herein include: ABE8e, ABE8.20m, APOBEC3A, Anc APOBEC (a.k.a. AncBE4Max), and BtAPOBEC2. Non-limiting exemplary ABEs suitable for use herein include: ABE7, ABE8.1m, ABE8.2m, ABE8.3m, ABE8.4m, ABE8.5m, ABE8.6m, ABE8.7m, ABE8.8m, ABE8.9m, ABE8.10m, ABE8.11m, ABE8.12m, ABE8.13m, ABE8.14m, ABE8.15m, ABE8.16m, ABE8.17m, ABE8.18m, ABE8.19m, ABE8.20m, ABE8.21m, ABE8.22m, ABE8.23m, ABE8.24m, ABE8.1d, ABE8.2d, ABE8.3d, ABE8.4d, ABE8.5d, ABE8.6d, ABE8.7d, ABE8.8d, ABE8.9d, ABE8.10d, ABE8.11d, ABE8.12d, ABE8.13d, ABE8.14d, ABE8.15d, ABE8.16d, ABE8.17d, ABE8.18d, ABE8.19d, ABE8.20d, ABE8.21d, ABE8.22d, ABE8.23d, and ABE8.24d. In some embodiments, the adenine base editing enzyme is an adenine base editing enzyme described in Chu et al., (2021) The CRISPR Journal 4:2:169-177, incorporated herein by reference. In some embodiments, the adenine deaminase is an adenine deaminase described by Koblan et al. (2018) Nature Biotechnology 36:848-846, incorporated herein by reference. In some embodiments, the adenine base editing enzyme is an adenine base editing enzyme described by Tran et al. (2020) Nature Communications 11:4871.

[0316] In some embodiments, the ABE is ABE8e and comprises an amino acid sequence that is at least at least 90%, at least 95%, at least 97%, at least 98%, or at least 99% identical to SEQ ID NO: 796. In some embodiments, the ABE is ABE8e and comprises or consists of SEQ ID NO: 796.

[0317] In some embodiments, the present disclosure provides a fusion protein comprising an effector protein described herein and a base editing enzyme described herein. In some embodiments, the fusion protein comprises, from N-terminus to C-terminus, an effector protein and a base editing enzyme. In some embodiments, the fusion protein comprises, from N-terminus to C-terminus, a base editing enzyme and an effector protein. In some embodiments, the base editing enzyme is ABE8e.

[0318] In some embodiments, the fusion protein described herein comprises an effector protein comprising an amino acid sequence that is at least 90%, 91%, 92%, 93%, 94%, 95%, 96%, 97%, 98%, or 99% identical to SEQ ID NO: 773 and a base editing enzyme comprising an amino acid sequence that is at least 90%, 91%, 92%, 93%, 94%, 95%, 96%, 97%, 98%, or 99% identical to SEQ ID NO: 796. In some embodiments, the fusion protein described herein comprises an effector protein comprising or consisting of SEQ ID NO: 773 and a base editing enzyme comprising or consisting of SEQ ID NO: 796. In some embodiments, the fusion protein comprises a linker sequence comprising SEQ ID NO: 795. In some embodiments, the fusion protein comprises an amino acid sequence that is at least at least 90%, at least 95%, at least 97%, at least 98%, or at least 99% identical to SEQ ID NO: 797. In some embodiments, the ABE is ABE8e and comprises or consists of SEQ ID NO: 797.

[0319] In some embodiments, the fusion protein described herein comprises an effector protein comprising an amino acid sequence that is at least 90%, 91%, 92%, 93%, 94%, 95%, 96%, 97%, 98%, or 99% identical to SEQ ID NO: 32 and a base editing enzyme comprising an amino acid sequence that is at least 90%, 91%, 92%, 93%, 94%, 95%, 96%, 97%, 98%, or 99% identical to SEQ ID NO: 796. In some embodiments, the fusion protein described herein comprises an effector protein comprising or consisting of SEQ ID NO: 32 and a base editing enzyme comprising or consisting of SEQ ID NO: 796. In some embodiments, the fusion protein comprises a linker sequence comprising SEQ ID NO: 795. In some embodiments, the fusion protein comprises an amino acid sequence that is at least at least 90%, at least 95%, at least 97%, at least 98%, or at least 99% identical to SEQ ID NO: 798. In some embodiments, the ABE is ABE8e and comprises or consists of SEQ ID NO: 798. Exemplary fusion proteins are provided in TABLE 23.

TABLE 23
Exemplary base editing enzyme and
base editor fusion proteins

| | | SEQ |
|---|---|---|
| Protein | AA Sequence | ID |
| ABE8e | SEVEFSHEYWMRHALTLAKRARDEREVPVG | 796 |
| | AVLVLNNRVIGEGWNRAIGLHDPTAHAEIM | |
| | ALRQGGLVMQNYRLIDATLYVTFEPCVMCA | |
| | GAMIHSRIGRVVFGVRNSKRGAAGSLMNVL | |
| | NYPGMNHRVEITEGILADECAALLCDFYRM | |
| | PRQVFNAQKKAQSSIN | |
| CasM. | MSVLTRKVQLIPVGDKEERDRVYKYLRDGI | |
| 265466- | EAQNRAMNLYMSGLYFAAINEASKEDRKEL | 797 |
| D220R- | NQLYSRIATSSKGSAYTTDIEFPTGLASTS | |
| E335Q_ABE8e | TLSMAVRQDFTKSLKDGLMYGRVSLPTYRK | |
| fusion | DNPLFVDVRFVALRGTKQKYNGLYHEYKSH | |
| | TEFLDNLYSSDLKVYIKFANDITFQVIFGN | |
| | PRKSSALRSEFQNIFEEYYKVCQSSIQFSG | |
| | TKIILNMAMRIPDKEIELDEDVCVGVDLGI | |
| | AIPAVCALNKNRYSRVSIGSKEDFLRVRTK | |
| | IRNQRKRLQTNLKSSNGGHGRKKKMKPMDR | |
| | FRDYEANWVQNYNHYVSRQVVDFAVKNKAK | |
| | YINLQNLEGIRDDVKNEWLLSNWSYYQLQQ | |
| | YITYKAKTYGIEVRKINPYHTSQRCSCCGY | |
| | EDAGNRPKKEKGQAYFKCLKCGEEMNADFN | |
| | AARNIAMSTEFQSGKKTKKQKKEQHENKGS | |
| | SGGSPAGSPTSTEEGTSESATPESGPGTST | |
| | EPSEGSAPGSPAGSGGGSSEVEFSHEYWMR | |
| | HALTLAKRARDEREVPVGAVLVLNNRVIGE | |
| | GWNRAIGLHDPTAHAEIMALRQGGLVMQNY | |
| | RLIDATLYVTFEPCVMCAGAMIHSRIGRVV | |
| | FGVRNSKRGAAGSLMNVLNYPGMNHRVEIT | |
| | EGILADECAALLCDFYRMPRQVFNAQKKAQ | |
| | SSIN | |
| CasPhi.12- | MIKPTVSQFLTPGFKLIRNHSRTAGKKLKN | 798 |
| L26K- | EGEEACKKFVRENEIPKDECPNFQGGPAIA | |
| E567Q_ABE8e | NIIAKSREFTEWEIYQSSLAIQEVIFTLPK | |
| fusion | DKLPEPILKEEWRAQWLSEHGLDTVPYKEA | |
| | AGLNLIIKNAVNTYKGVQVKVDNKNKNNLA | |
| | KINRKNEIAKLNGEQEISFEEIKAFDDKGY | |
| | LLQKPSPNKSIYCYQSVSPKPFITSKYHNV | |
| | NLPEEYIGYYRKSNEPIVSPYQFDRLRIPI | |
| | GEPGYVPKWQYTFLSKKENKRRKLSKRIKN | |
| | VSPILGIICIKKDWCVFDMRGLLRTNHWKK | |
| | YHKPTDSINDLFDYFTGDPVIDTKANVVRF | |
| | RYKMENGIVNYKPVREKKGKELLENICDQN | |
| | GSCKLATVDVGQNNPVAIGLFELKKVNGEL | |
| | TKTLISRHPTPIDFCNKITAYRERYDKLES | |
| | SIKLDAIKQLTSEQKIEVDNYNNNFTPQNT | |
| | KQIVCSKLNINPNDLPWDKMISGTHFISEK | |
| | AQVSNKSEIYFTSTDKGKTKDVMKSDYKWF | |
| | QDYKPKLSKEVRDALSDIEWRLRRESLEFN | |
| | KLSKSREQDARQLANWISSMCDVIGIQNLV | |
| | KKNNFFGGSGKREPGWDNFYKPKKENRWWI | |
| | NAIHKALTELSQNKGKRVILLPAMRTSITC | |
| | PKCKYCDSKNRNGEKFNCLKCGIELNADID | |
| | VATENLATVAITAQSMPKPTCERSGDAKKP | |
| | VRARKAKAPEFHDKLAPSYTVVLREAVGSS | |
| | GGSPAGSPTSTEEGTSESATPESGPGTSTE | |
| | PSEGSAPGSPAGSGGGSSEVEFSHEYWMRH | |
| | ALTLAKRARDEREVPVGAVLVLNNRVIGEG | |
| | WNRAIGLHDPTAHAEIMALRQGGLVMQNYR | |
| | LIDATLYVTFEPCVMCAGAMIHSRIGRVVF | |
| | GVRNSKRGAAGSLMNVLNYPGMNHRVEITE | |
| | GILADECAALLCDFYRMPRQVFNAQKKAQS | |
| | SIN | |

[0320] In some embodiments, an adenine base editing enzyme of an ABE is an adenosine deaminase. Non-limiting exemplary adenosine base editing enzymes suitable for use herein include ABE9. In some embodiments, the ABE comprises an engineered adenosine deaminase enzyme capable of acting on ssDNA. The engineered adenosine deaminase enzyme may be an adenosine deaminase variant that differs from a naturally occurring deaminase. Relative to the naturally occurring deaminase, the adenosine deaminase variant may comprise one or more amino acid alteration, including a V82S alteration, a T166R alteration, a Y147T alteration, a Y147R alteration, a Q154S alteration, a Y123H alteration, a Q154R alteration, or a combination thereof.

[0321] In some embodiments, a base editor comprises a deaminase dimer. In some embodiments, the base editor further comprising a base editing enzyme and an adenine deaminase (e.g., TadA). In some embodiments, the adenosine deaminase is a TadA monomer (e.g., Tad*7.10, TadA*8 or TadA*9). In some embodiments, the adenosine deaminase is a TadA*8 variant (e.g., any one of TadA*8.1, TadA*8.2, TadA*8.3, TadA*8.4, TadA*8.5, TadA*8.6, TadA*8.7, TadA*8.8, TadA*8.9, TadA*8.10, TadA*8.11, TadA*8.12, TadA*8.13, TadA*8.14, TadA*8.15, TadA*8.16, TadA*8.17, TadA*8.18, TadA*8.19, TadA*8.20, TadA*8.21, TadA*8.22, TadA*8.23, or TadA*8.24 as described in WO2021163587 and WO2021050571, which are each hereby incorporated by reference in its entirety). In some embodiments, the base editor comprises a base editing enzyme linked to TadA by a linker (e.g., wherein the base editing enzyme is linked to TadA at N-terminus or C-terminus by a linker).

[0322] In some embodiments, a base editing enzyme is a deaminase dimer comprising an ABE. In some embodiments, the deaminase dimer comprises an adenosine deaminase. In some embodiments, the deaminase dimer comprises TadA linked to a suitable adenine base editing enzyme including an: ABE8e, ABE8.20m, APOBEC3A, Anc APOBEC (a.k.a. AncBE4Max), BtAPOBEC2, and variants thereof. In some embodiments, the adenine base editing enzyme is linked to amino-terminus or the carboxy-terminus of TadA.

[0323] In some embodiments, RNA base editors comprise an adenosine deaminase. In some embodiments, ADAR proteins bind to RNAs and alter their sequence by changing an adenosine into an inosine. In some embodiments, RNA base editors comprise an effector protein that is activated by or binds RNA.

[0324] In some embodiments, base editors are used to treat a subject having or a subject suspected of having a disease related to a gene of interest. In some embodiments, base editors are useful for treating a disease or a disorder caused by a point mutation in a gene of interest. In some embodiments, compositions, systems, and methods described herein comprise a base editor and a guide nucleic acid, wherein the guide nucleic acid directs the base editor to a sequence in a target gene.

### Precision Editing Systems

[0325] In some embodiments, the fusion partner comprises a polymerase. In some embodiments, the fusion partner is an RNA-directed DNA polymerase (RDDP). In some embodiments, the RDDP is a reverse transcriptase.

[0326] In some embodiments, the RDDP that is capable of catalyzing the modification of the target nucleic acid forms a complex with an extended guide RNA. In some embodiments, the extended guide RNA comprises (not necessarily in this order): a first region (also referred to as a protein binding region or protein binding sequence) that interacts with an effector protein; a second region comprising a spacer sequence that is complementary to a target sequence of a first strand of a target dsDNA molecule; a third region comprising a template sequence that is complementary to at least a portion of the target sequence on the non-target strand of the target dsDNA molecule with the exception of at least one nucleotide; and a fourth region comprising a primer binding sequence that hybridizes to a primer sequence of the target dsDNA molecule that is formed when target nucleic acid is cleaved. The third region or template sequence may comprise a nucleotide having a different nucleobase than that of a nucleotide at the corresponding position in the target nucleic acid when the template sequence and the target sequence are aligned for maximum identity. In some embodiments, there is a linker between any one of the first, second, third and fourth regions. In some embodiments, the linker comprises a nucleotide. In some embodiments, the linker comprises multiple nucleotides.

[0327] In some embodiments, the third and fourth regions are 5′ of the first and second regions. In some embodiments, the order of the regions of the extended guide RNA from 5′ to 3′ is: third region, fourth region, first region, and second region. In some embodiments, there is a linker between any one of the first, second, third and fourth regions. In some embodiments, there is a linker between the first and fourth regions. In some embodiments, the effector protein is linked to an RDDP. In some embodiments, the RDDP comprises a reverse transcriptase.

[0328] In some embodiments, the third and fourth regions are 3′ of the first and second regions. In some embodiments, the order of the regions of the extended guide RNA from 5′ to 3′ is: first region, second region, third region, and fourth region. In some embodiments, there is a linker between the second and third regions.

### Protein Modification Activity

[0329] In some embodiments, a fusion partner provides enzymatic activity that modifies a protein associated with a target nucleic acid. The protein may be a histone, an RNA binding protein, or a DNA binding protein. Examples of such protein modification activities include: methyltransferase activity, such as that provided by a histone methyltransferase (HMT) (e.g., suppressor of variegation 3-9 homolog 1 (SUV39H1, also known as KMT1A), euchromatic histone lysine methyltransferase 2 (G9A, also known as KMT1C and EHMT2), SUV39H2, ESET/SETDB1, SET1A, SET1B, MLL1 to 5, ASH1, SYMD2, NSD1, DOT1L, Pr-SET7/8, SUV4-20H1, EZH2, RIZ1); demethylase activity such as that provided by a histone demethylase (e.g., Lysine Demethylase 1A (KDM1A also known as LSD1), JHDM2a/b, JMJD2A/JHDM3A, JMJD2B, JMJD2C/GASC1, JMJD2D, JARID1A/RBP2, JARID1B/PLU-1, JARID1C/SMCX, JARID1D/SMCY, UTX, JMJD3); acetyltransferase activity such as that provided by a histone acetylase transferase (e.g., catalytic core/fragment of the human acetyltransferase p300, GCN5, PCAF, CBP, TAF1, TIP60/PLIP, MOZ/MYST3, MORF/MYST4, HBO1/MYST2, HMOF/MYST1, SRC1, ACTR, P160, CLOCK); deacetylase activity such as that provided by a histone deacetylase (e.g., HDAC1, HDAC2, HDAC3, HDAC8, HDAC4, HDAC5, HDAC7, HDAC9, SIRT1, SIRT2, HDAC11); kinase activity; phosphatase activity; ubiquitin ligase activity; deubiquitinating activity; adenylation activity; deadenylation activity; SUMOylating activity; deSUMOylating activity; ribosylation activity; deribosylation activity; myristoylation activity; and demyristoylation activity.

### CRISPRa Fusions and CRISPRi Fusions

[0330] In some embodiments, fusion partners include, but are not limited to, a protein that directly and/or indirectly provides for increased or decreased transcription and/or translation of a target nucleic acid (e.g., a transcription activator or a fragment thereof, a protein or fragment thereof that recruits a transcription activator, a small molecule/drug-responsive transcription and/or translation regulator, a translation-regulating protein, etc.). In some embodiments, fusion partners that increase or decrease transcription include a transcription activator domain or a transcription repressor domain, respectively.

[0331] In some embodiments, fusion partners activate or increase expression of a target nucleic acid. Such fusion proteins comprising the described fusion partners and an effector protein may be referred to as CRISPRa fusions. In some embodiments, fusion partners increase expression of the target nucleic acid relative to its expression in the absence of the fusion effector protein. Relative expression, including transcription and RNA levels, may be assessed, quantified, and compared, e.g., by RT-qPCR. In some embodiments, fusion partners comprise a transcriptional activator. In general, a transcriptional activator refers to a polypeptide or a fragment thereof that can activate or increase transcription of a target nucleic acid molecule. In some embodiments, the transcriptional activators may promote transcription by: recruitment of other transcription factor proteins; modification of target DNA such as demethylation; recruitment of a DNA modifier; modulation of histones associated with target DNA; recruitment of a histone modifier such as those that modify acetylation and/or methylation of histones; or a combination thereof. In some embodiments, the fusion partner is a reverse transcriptase.

[0332] Non-limiting examples of fusion partners that promote or increase transcription include: transcriptional activators such as VP16, VP64, VP48, VP160, p65 subdomain (e.g., from NFkB), and activation domain of EDLL and/or TAL activation domain (e.g., for activity in plants); histone lysine methyltransferases such as SET1A, SET1B, MLL1 to 5, ASH1, SYMD2, NSD1; histone lysine demethylases such as JHDM2a/b, UTX, JMJD3; histone acetyltransferases such as GCN5, PCAF, CBP, p300, TAF1, TIP60/PLIP, MOZ/MYST3, MORF/MYST4, SRC1, ACTR, P160, CLOCK; and DNA demethylases such as Ten-Eleven Translocation (TET) dioxygenase 1 (TET1CD), TET1, DME, DML1, DML2, and ROS1; and functional domains thereof. Other non-limiting examples of suitable fusion partners include: proteins and protein domains responsible for stimulating translation (e.g., Staufen); proteins and protein domains responsible for (e.g., capable of) modulating translation (e.g., translation factors such as initiation factors, elongation factors, release factors, etc., e.g., eIF4G); proteins and protein domains responsible for stimulation of RNA splicing (e.g., Serine/Arginine-rich (SR) domains); and proteins and protein domains responsible for stimulating transcription (e.g., CDK7 and HIV Tat).

[0333] In some embodiments, fusions partners inhibit or reduce expression of a target nucleic acid. Such fusion proteins comprising described fusion partners and an effector protein may be referred to as CRISPRi fusions. In some embodiments, fusion partners reduce expression of the target nucleic acid relative to its expression in the absence of the fusion effector protein. Relative expression, including transcription and RNA levels, may be assessed, quantified, and compared, e.g., by RT-qPCR. In some embodiments, fusion partners may comprise a transcriptional repressor. In some embodiments, the transcriptional repressors may inhibit transcription by: recruitment of other transcription factor proteins; modification of target DNA such as methylation; recruitment of a DNA modifier; modulation of histones associated with target DNA; recruitment of a histone modifier such as those that modify acetylation and/or methylation of histones; or a combination thereof.

[0334] In some embodiments, the guide nucleic acids disclosed herein can be used in combination with a fusion protein for epigenetic modification of the APOC3, the PCSK9, or the ANGPTL3 genes. In some embodiments, the fusion protein comprises an effector protein and a methyltransferase. In some embodiments, the fusion protein further comprises a KRAB domain. In some embodiments, the methyltransferase is selected from M.HhaI, DNMT1, DNMT3A, DNMT3B, DNMT3L, and a combination thereof. In some embodiments, the methyltransferase is selected from DNMT3A, DNMT3L, and a combination thereof. In some embodiments, the methyltransferase is DNMT3L. In some embodiments, the fusion protein does not comprise DNMT3A. In some embodiments, the effector protein is CasPhi.12 or a variant thereof, and the guide nucleic acid comprises a sequence that is at least at least 70%, at least 80%, at least 90%, at least 91%, at least 92%, at least 93%, at least 94%, at least 95%, at least 96%, at least 97%, or at least 99%, or 100% identical to any one of the sequences of SEQ ID NOs: 1400-1569. In some embodiments, the effector protein is CasM.265466 or a variant thereof, and the guide nucleic acid comprises a sequence that is at least at least 70%, at least 80%, at least 90%, at least 91%, at least 92%, at least 93%, at least 94%, at least 95%, at least 96%, at least 97%, or at least 99%, or 100% identical to any one of the sequences of SEQ ID NOs: 1570-1969.

[0335] Non-limiting examples of fusion partners that decrease or inhibit transcription include: transcriptional repressors such as the Krüppel associated box (KRAB or SKD); KOX1 repression domain; the Mad mSIN3 interaction domain (SID); the ERF repressor domain (ERD), the SRDX repression domain (e.g., for repression in plants); histone lysine methyltransferases such as Pr-SET7/8, SUV4-20H1, RIZ1, and the like; histone lysine demethylases such as JMJD2A/JHDM3A, JMJD2B, JMJD2C/GASC1, JMJD2D, JARID1A/RBP2, JARID1B/PLU-1, JARID1C/SMCX, JARID1D/SMCY; histone lysine deacetylases such as HDAC1, HDAC2, HDAC3, HDAC8, HDAC4, HDAC5, HDAC7, HDAC9, SIRT1, SIRT2, HDAC11; DNA methylases such as HhaI DNA m5c-methyltransferase (M.HhaI), DNA methyltransferase 1 (DNMT1), DNA methyltransferase 3a (DNMT3a), DNA methyltransferase 3b (DNMT3b), METI, DRM3 (plants), ZMET2, CMT1, CMT2 (plants); and periphery recruitment elements such as Lamin A, and Lamin B; and functional domains thereof. Other non-limiting examples of suitable fusion partners include: proteins and protein domains responsible for repressing translation (e.g., Ago2 and Ago4); proteins and protein domains responsible for repression of RNA splicing (e.g., PTB, Sam68, and hnRNP A1); proteins and protein domains responsible for reducing the efficiency of transcription (e.g., FUS (TLS)).

[0336] In some embodiments, fusion proteins are targeted by a guide nucleic acid (e.g., guide RNA) to a specific location in a target nucleic acid and exert locus-specific regulation such as blocking RNA polymerase binding to a promoter (which selectively inhibits transcription activator function), and/or changes a local chromatin status (e.g., when a fusion sequence is used that edits the target nucleic acid or modifies a protein associated with the target nucleic acid). In some embodiments, the modifications are transient (e.g., transcription repression or activation). In some embodiments, the modifications are inheritable. For example, epigenetic modifications made to a target nucleic acid, or to proteins associated with the target nucleic acid, e.g., nucleosomal histones, in a cell, can be observed in a successive generation.

[0337] In some embodiments, fusion partner comprises an RNA splicing factor. The RNA splicing factor may be used (in whole or as fragments thereof) for modular organization, with separate sequence-specific RNA binding modules and splicing effector domains. In some embodiments, the RNA splicing factors comprise members of the Serine/Arginine-rich (SR) protein family containing N-terminal RNA recognition motifs (RRMs) that bind to exonic splicing enhancers (ESEs) in pre-mRNAs and C-terminal RS domains that promote exon inclusion. In some embodiments, a hnRNP protein hnRNP Al binds to exonic splicing silencers (ESSs) through its RRM domains and inhibits exon inclusion through a C-terminal Glycine-rich domain. In some embodiments, the RNA splicing factors may regulate alternative use of splice site (ss) by binding to regulatory sequences between two alternative sites. For example, in some embodiments, ASF/SF2 may recognize ESEs and promote the use of intron proximal sites, whereas hnRNP Al may bind to ESSs and shift splicing towards the use of intron distal sites. One application for such factors is to generate ESFs that modulate alternative splicing of endogenous genes, particularly disease associated genes. For example, Bcl-x pre-mRNA produces two splicing isoforms with two alternative 5′ splice sites to encode proteins of opposite functions. Long splicing isoform Bcl-xL is a potent apoptosis inhibitor expressed in long-lived postmitotic cells and is up-regulated in many cancer cells, protecting cells against apoptotic signals. Short isoform Bcl-xS is a pro-apoptotic isoform and expressed at high levels in cells with a high turnover rate (e.g., developing lymphocytes). A ratio of the two Bcl-x splicing isoforms is regulated by multiple c\acute{ω}-elements that are located in either core exon region or exon extension region (i.e., between the two alternative 5′ splice sites). For more examples, see WO2010075303, which is hereby incorporated by reference in its entirety.

### Recombinases

[0338] In some embodiments, fusion partners comprise a recombinase. In some embodiments, effector proteins described herein are linked with the recombinase. In some embodiments, the effector proteins have reduced nuclease activity or no nuclease activity. In some embodiments, the recombinase is a site-specific recombinase.

[0339] In some embodiments, a catalytically inactive effector protein is linked with a recombinase, wherein the recombinase can be a site-specific recombinase. Such polypeptides can be used for site-directed transgene insertion. Non-limiting examples of site-specific recombinases include a tyrosine recombinase (e.g., Cre, Flp or lambda integrase), a serine recombinase (e.g., gamma-delta resolvase, Tn3 resolvase, Sin resolvase, Gin invertase, Hin invertase, Tn5044 resolvase, IS607 transposase and integrase), or mutants or variants thereof. In some embodiments, the recombinase is a serine recombinase. Non-limiting examples of serine recombinases include gamma-delta resolvase, Tn3 resolvase, Sin resolvase, Gin invertase, Hin invertase, Tn5044 resolvase, IS607 transposase, and IS607 integrase. In some embodiments, the site-specific recombinase is an integrase. Non-limiting examples of integrases include: Bxb1, wBeta, BL3, phiR4, A118, TG1, MR11, phi370, SPBc, TP901-1, phiRV, FC1, K38, phiBT1, and phiC31. Further discussion and examples of suitable recombinase fusion partners are described in U.S. Pat. No. 10,975,392, which is incorporated herein by reference in its entirety. In some embodiments, the fusion protein comprises a linker that links the recombinase to the Cas-CRISPR domain of the effector protein. In some embodiments, the linker is The-Ser.

### 5. Exemplary Systems

[0340] In some embodiments, the present disclosure provides a system comprising (1) a guide RNA or a polynucleotide encoding the same, wherein the guide RNA comprises a spacer sequence that is capable of hybridizing to a target nucleic acid sequence in a gene selected from APOC3, PCSK9, and ANGPTL3; and (2) an effector protein or fusion protein thereof or a polynucleotide encoding the same.

### Exemplary APOC3 Systems

[0341] In some embodiments, the present disclosure provides a system comprising (1) a guide RNA or a polynucleotide encoding the same, wherein the guide RNA comprises a spacer sequence that is capable of hybridizing to a target nucleic acid sequence in the APOC3 gene; and (2) an effector protein or fusion protein thereof or a polynucleotide encoding the same.

[0342] In some embodiments, the effector protein comprises an amino acid sequence that is at least 90%, at least, 91%, at least 92%, at least 93%, at least 94%, at least 95%, at least 96%, at least 97%, at least 98%, or at least 99% identical to any one of the sequences recited in TABLEs 15, 18, and 19, and the guide RNA comprises (a) a repeat sequence that is at least 90%, at least, 91%, at least 92%, at least 93%, at least 94%, at least 95%, at least 96%, at least 97%, at least 98%, or at least 99% identical to a sequence selected from any one of SEQ ID NOs: 16 and 38-43 and (b) a spacer sequence that is at least 90%, at least, 91%, at least 92%, at least 93%, at least 94%, at least 95%, at least 96%, at least 97%, at least 98%, or at least 99% identical a sequence selected from to any one of SEQ ID NOs: 1-15, 67-72, 207, 804-805, and 830-999. In some embodiments, the guide RNA sequence is at least 90%, at least, 91%, at least 92%, at least 93%, at least 94%, at least 95%, at least 96%, at least 97%, at least 98%, or at least 99% identical to a sequence selected from any one of SEQ ID NOs: 17-31, 73-78, 491, 815-816, and 1400-1569.

[0343] In some embodiments, the effector protein comprises any one of the sequences recited in TABLEs 15, 18, and 19, and the guide RNA comprises (a) a repeat sequence comprising any one of SEQ ID NOs: 16 and 38-43 and (b) a spacer sequence comprising any one of SEQ ID NOs: 1-15, 67-72, 207, 804-805, and 830-999. In some embodiments, the guide RNA sequence comprises any one of SEQ ID NOs: 17-31, 73-78, 491, 815-816, and 1400-1569.

[0344] In some embodiments, the effector protein consists of a sequence recited in TABLEs 15, 18, or 19, and the guide RNA consists of (a) a repeat sequence consisting of a sequence selected from any one of SEQ ID NOs: 16 and 38-43 and (b) a spacer sequence consisting of a sequence selected from any one of SEQ ID NOs: 1-15, 67-72, 207, 804-805, or 830-999. In some embodiments, the guide RNA sequence consists of a sequence selected from any one of SEQ ID NOs: 17-31, 73-78, 491, 815-816, and 1400-1569.

[0345] In some embodiments, the effector protein comprises an amino acid sequence that is at least 90%, at least, 91%, at least 92%, at least 93%, at least 94%, at least 95%, at least 96%, at least 97%, at least 98%, or at least 99% identical to a sequence selected from any one of SEQ ID NOs: 32, 34, 794, and 2090, and the guide RNA comprises (a) a repeat sequence that is at least 90%, at least, 91%, at least 92%, at least 93%, at least 94%, at least 95%, at least 96%, at least 97%, at least 98%, or at least 99% identical to a sequence selected any one of SEQ ID NOs: 16 and 38-43 and (b) a spacer sequence that is at least 90%, at least, 91%, at least 92%, at least 93%, at least 94%, at least 95%, at least 96%, at least 97%, at least 98%, or at least 99% identical a sequence selected from to any one of SEQ ID NOs: 1-15, 67-72, 207, 804-805, and 830-999. In some embodiments, the guide RNA sequence is at least 90%, at least, 91%, at least 92%, at least 93%, at least 94%, at least 95%, at least 96%, at least 97%, at least 98%, or at least 99% identical a sequence selected from to any one of SEQ ID NOs: 17-31, 73-78, 491, 815-816, and 1400-1569.

[0346] In some embodiments, the effector protein comprises any one of SEQ ID NOs: 32, 34, 794, and 2090, and the guide RNA comprises (a) a repeat sequence comprising any one of SEQ ID NOs: 16 and 38-43 and (b) a spacer sequence comprising any one of SEQ ID NOs: 1-15, 67-72, 207, 804-805, and 830-999. In some embodiments, the guide RNA sequence comprises any one of SEQ ID NOs: 17-31, 73-78, 491, 815-816, and 1400-1569.

[0347] In some embodiments, the effector protein consists of a sequence selected from any one of SEQ ID NOs: 32, 34, 794, or 2090, and the guide RNA consists of (a) a repeat sequence consisting of a sequence selected from any one of SEQ ID NOs: 16 or 38-43 and (b) a spacer sequence consisting of a sequence selected from any one of SEQ ID NOs: 1-15, 67-72, 207, 804-805, or 830-999. In some embodiments, the guide RNA sequence consists of a sequence selected from any one of SEQ ID NOs: 17-31, 73-78, 491, 815-816, or 1400-1569.

[0348] In some embodiments, the effector protein comprises an amino acid sequence that is at least 90%, at least, 91%, at least 92%, at least 93%, at least 94%, at least 95%, at least 96%, at least 97%, at least 98%, or at least 99% identical to a sequence selected from any one of SEQ ID NOs: 32, 34, 794, and 2090, wherein the effector protein is fused to a KRAB domain, a methyltransferase, or a combination thereof, and the guide RNA comprises (a) a repeat sequence that is at least 90%, at least, 91%, at least 92%, at least 93%, at least 94%, at least 95%, at least 96%, at least 97%, at least 98%, or at least 99% identical to a sequence selected from any one of SEQ ID NOs: 16 and 38-43 and (b) a spacer sequence that is at least 90%, at least, 91%, at least 92%, at least 93%, at least 94%, at least 95%, at least 96%, at least 97%, at least 98%, or at least 99% identical to a sequence selected from any one of SEQ ID NOs: 830-999. In some embodiments, the guide RNA sequence is at least 90%, at least, 91%, at least 92%, at least 93%, at least 94%, at least 95%, at least 96%, at least 97%, at least 98%, or at least 99% identical to a sequence selected from any one of SEQ ID NOs: 1400-1569.

[0349] In some embodiments, the effector protein comprises any one of SEQ ID NOs: 32, 34, 794, and 2090, wherein the effector protein is fused to a KRAB domain, a methyltransferase, or a combination thereof, and the guide RNA comprises (a) a repeat sequence comprising any one of SEQ ID NOs: 16 and 38-43 and (b) a spacer sequence comprising any one of SEQ ID NOs: 830-999. In some embodiments, the guide RNA sequence comprises any one of SEQ ID NOs: 1400-1569.

[0350] In some embodiments, the effector protein consists of a sequence selected from any one of SEQ ID NOs: 32, 34, 794, or 2090, wherein the effector protein is fused to a KRAB domain, a methyltransferase, or a combination thereof, and the guide RNA consists of (a) a repeat sequence consisting of a sequence selected from any one of SEQ ID NOs: 16 or 38-43 and (b) a spacer sequence consisting of a sequence selected from any one of SEQ ID NOs: 830-999. In some embodiments, the guide RNA sequence consists of a sequence selected from any one of SEQ ID NOs: 1400-1569.

[0351] In some embodiments, the effector protein comprises an amino acid sequence that is at least 90%, at least, 91%, at least 92%, at least 93%, at least 94%, at least 95%, at least 96%, at least 97%, at least 98%, or at least 99% identical to a sequence selected from any one of SEQ ID NOs: 32, 34, 794, and 2090, and the guide RNA comprises (a) a repeat sequence that is at least 90%, at least, 91%, at least 92%, at least 93%, at least 94%, at least 95%, at least 96%, at least 97%, at least 98%, or at least 99% identical SEQ ID NO: 39 and (b) a spacer sequence that is at least 90%, at least, 91%, at least 92%, at least 93%, at least 94%, at least 95%, at least 96%, at least 97%, at least 98%, or at least 99% identical to SEQ ID NO: 10. In some embodiments, the guide RNA sequence is at least 90%, at least, 91%, at least 92%, at least 93%, at least 94%, at least 95%, at least 96%, at least 97%, at least 98%, or at least 99% identical to any one of SEQ ID NO: 26.

[0352] In some embodiments, the effector protein comprises any one of SEQ ID NOs: 32, 34, 794, and 2090, and the guide RNA comprises (a) a repeat sequence comprising SEQ ID NO: 39 and (b) a spacer sequence comprising SEQ ID NO: 10. In some embodiments, the guide RNA sequence comprises SEQ ID NO: 26.

[0353] In some embodiments, the effector protein consists of any one of SEQ ID NOs: 32, 34, 794, or 2090, and the guide RNA consists of (a) a repeat sequence consisting of SEQ ID NO: 39 and (b) a spacer sequence consisting of SEQ ID NO: 10. In some embodiments, the guide RNA sequence consists of SEQ ID NO: 26.

[0354] In some embodiments, the effector protein comprises an amino acid sequence that is at least 90%, at least, 91%, at least 92%, at least 93%, at least 94%, at least 95%, at least 96%, at least 97%, at least 98%, or at least 99% identical to a sequence selected from any one of SEQ ID NOs: 32, 34, 794, and 2090, and the guide RNA comprises (a) a repeat sequence that is at least 90%, at least, 91%, at least 92%, at least 93%, at least 94%, at least 95%, at least 96%, at least 97%, at least 98%, or at least 99% identical SEQ ID NO: 39 and (b) a spacer sequence that is at least 90%, at least, 91%, at least 92%, at least 93%, at least 94%, at least 95%, at least 96%, at least 97%, at least 98%, or at least 99% identical to SEQ ID NO: 71. In some embodiments, the guide RNA sequence is at least 90%, at least, 91%, at least 92%, at least 93%, at least 94%, at least 95%, at least 96%, at least 97%, at least 98%, or at least 99% identical to any one of SEQ ID NO: 77.

[0355] In some embodiments, the effector protein comprises any one of SEQ ID NOs: 32, 34, 794, and 2090, and the guide RNA consists of (a) a repeat sequence consisting of SEQ ID NO: 39 and (b) a spacer sequence consisting of SEQ ID NO: 71. In some embodiments, the guide RNA sequence consists of SEQ ID NO: 77.

[0356] In some embodiments, the effector protein consists of a sequence selected from any one of SEQ ID NOs: 32, 34, 794, or 2090, and the guide RNA consists of (a) a repeat sequence consisting of SEQ ID NO: 39 and (b) a spacer sequence consisting of SEQ ID NO: 71. In some embodiments, the guide RNA sequence consists of SEQ ID NO: 77.

[0357] In some embodiments, the effector protein comprises an amino acid sequence that is at least 90%, at least, 91%, at least 92%, at least 93%, at least 94%, at least 95%, at least 96%, at least 97%, at least 98%, or at least 99% identical to a sequence selected from any one of TABLEs 15, 16, and 17, and the guide RNA comprises (a) a repeat sequence that is at least 90%, at least, 91%, at least 92%, at least 93%, at least 94%, at least 95%, at least 96%, at least 97%, at least 98%, or at least 99% identical to a sequence selected from any one of SEQ ID NO: 488, and (b) a spacer sequence that is at least 90%, at least, 91%, at least 92%, at least 93%, at least 94%, at least 95%, at least 96%, at least 97%, at least 98%, or at least 99% identical to a sequence selected from any one of SEQ ID NOs: 209-299, 823-825, 1000-1399, 2018-2026, and 2084-2086. In some embodiments, the system further comprises an (c) intermediary sequence that is at least 90%, at least, 91%, at least 92%, at least 93%, at least 94%, at least 95%, at least 96%, at least 97%, at least 98%, or at least 99% identical to SEQ ID NO: 489 or (d) a handle sequence that is at least 90%, at least, 91%, at least 92%, at least 93%, at least 94%, at least 95%, at least 96%, at least 97%, at least 98%, or at least 99% identical to SEQ ID NO: 490. In some embodiments, the guide RNA sequence is at least 90%, at least, 91%, at least 92%, at least 93%, at least 94%, at least 95%, at least 96%, at least 97%, at least 98%, or at least 99% identical to a sequence selected from any one of SEQ ID NOs: 494-584, 826-828, 1570-1969, 2075-2083, and 2087-2089.

[0358] In some embodiments, the effector protein comprises any one of the sequences recited in TABLEs 15, 16, and 17, and the guide RNA comprises (a) a repeat sequence comprising SEQ ID NO: 488 and (b) a spacer sequence selected from any one of SEQ ID NOs: 209-299, 823-825, 1000-1399, 2018-2026, and 2084-2086. In some embodiments, the system further comprises (c) an intermediary sequence comprising SEQ ID NO: 489 or (d) a handle sequence comprising SEQ ID NO: 490. In some embodiments, the guide RNA sequence comprises any one of SEQ ID NOs: 494-584, 826-828, 1570-1969, 2075-2083, and 2087-2089.

[0359] In some embodiments, the effector protein consists of any one of the sequences recited in TABLEs 15, 16, or 17, and (2) a guide RNA consists of (a) a repeat sequence consisting of SEQ ID NO: 488 and a spacer sequence consisting of (b) a sequence selected from any one of SEQ ID NOs: 209-299, 823-825, 1000-1399, 2018-2026, or 2084-2086. In some embodiments, the system further comprises (c) an intermediary sequence consisting of SEQ ID NO: 489 or (d) a handle sequence consisting of SEQ ID NO: 490. In some embodiments, the guide RNA sequence consists of a sequence selected from any one of SEQ ID NOs: 494-584, 826-828, 1570-1969, 2075-2083, or 2087-2089.

[0360] In some embodiments, the effector protein comprises an amino acid sequence that is at least 90%, at least, 91%, at least 92%, at least 93%, at least 94%, at least 95%, at least 96%, at least 97%, at least 98%, or at least 99% identical to a sequence selected from any one of SEQ ID NOs: 773, 775, and 793, and the guide RNA comprises (a) a repeat sequence that is at least 90%, at least, 91%, at least 92%, at least 93%, at least 94%, at least 95%, at least 96%, at least 97%, at least 98%, or at least 99% identical to SEQ ID NO: 488, and (b) a spacer sequence that is at least 90%, at least, 91%, at least 92%, at least 93%, at least 94%, at least 95%, at least 96%, at least 97%, at least 98%, or at least 99% identical to a sequence selected from any one of SEQ ID NOs: 209-299, 823-825, 1000-1399, 2018-2026, and 2084-2086. In some embodiments, the system further comprises (c) an intermediary sequence that is at least 90%, at least, 91%, at least 92%, at least 93%, at least 94%, at least 95%, at least 96%, at least 97%, at least 98%, or at least 99% identical to SEQ ID NO: 489 or (d) a handle sequence that is at least 90%, at least, 91%, at least 92%, at least 93%, at least 94%, at least 95%, at least 96%, at least 97%, at least 98%, or at least 99% identical to SEQ ID NO: 490. In some embodiments, the guide RNA sequence is at least 90%, at least, 91%, at least 92%, at least 93%, at least 94%, at least 95%, at least 96%, at least 97%, at least 98%, or at least 99% identical to a sequence selected from any one of SEQ ID NOs: 494-584, 826-828, 1570-1969, 2075-2083, and 2087-2089.

[0361] In some embodiments, the effector protein comprises a sequence selected from any one of SEQ ID NOs: 773, 775, and 793, and the guide RNA comprises (a) a repeat sequence comprising SEQ ID NO: 488 and (b) a spacer sequence selected from any one of SEQ ID NOs: 209-299, 823-825, 1000-1399, 2018-2026, and 2084-2086. In some embodiments, the system further comprises (c) an intermediary sequence comprising SEQ ID NO: 489 or (d) a handle sequence comprising SEQ ID NO: 490. In some embodiments, the guide RNA sequence comprises any one of SEQ ID NOs: 494-584, 826-828, 1570-1969, 2075-2083, and 2087-2089.

[0362] In some embodiments, the effector protein consists of a sequence selected from any one of SEQ ID NOs: 773, 775, or 793, and the guide RNA consists of (a) a repeat sequence consisting of SEQ ID NO: 488 and (b) a spacer sequence consisting of a sequence selected from any one of SEQ ID NOs: 209-299, 823-825, 1000-1399, 2018-2026, or 2084-2086. In some embodiments, the system further comprises (c) an intermediary sequence consisting of SEQ ID NO: 489 or (d) a handle sequence consisting of SEQ ID NO: 490. In some embodiments, the guide RNA sequence consists of a sequence selected from any one of SEQ ID NOs: 494-584, 826-828, 1570-1969, 2075-2083, or 2087-2089.

[0363] In some embodiments, the effector protein comprises an amino acid sequence that is at least 90%, at least, 91%, at least 92%, at least 93%, at least 94%, at least 95%, at least 96%, at least 97%, at least 98%, or at least 99% identical to a sequence selected from any one of SEQ ID NOs: 773, 775, and 793, wherein the effector protein is fused to a KRAB domain, a methyltransferase, or a combination thereof, and the guide RNA comprises (a) a repeat sequence that is at least 90%, at least, 91%, at least 92%, at least 93%, at least 94%, at least 95%, at least 96%, at least 97%, at least 98%, or at least 99% identical to SEQ ID NO: 488, and (b) a spacer sequence that is at least 90%, at least, 91%, at least 92%, at least 93%, at least 94%, at least 95%, at least 96%, at least 97%, at least 98%, or at least 99% identical to a sequence selected from any one of SEQ ID NOs: 1000-1399. In some embodiments, the system further comprises (c) an intermediary sequence that is at least 90%, at least, 91%, at least 92%, at least 93%, at least 94%, at least 95%, at least 96%, at least 97%, at least 98%, or at least 99% identical to SEQ ID NO: 489 and (d) a handle sequence that is at least 90%, at least, 91%, at least 92%, at least 93%, at least 94%, at least 95%, at least 96%, at least 97%, at least 98%, or at least 99% identical to SEQ ID NO: 490. In some embodiments, the guide RNA sequence is at least 90%, at least, 91%, at least 92%, at least 93%, at least 94%, at least 95%, at least 96%, at least 97%, at least 98%, or at least 99% identical to a sequence selected from any one of SEQ ID NOs: 1570-1969.

[0364] In some embodiments, the effector protein comprises a sequence selected from any one of SEQ ID NOs: 773, 775, and 793, wherein the effector protein is fused to a KRAB domain, a methyltransferase, or a combination thereof, and the guide RNA comprises (a) a repeat sequence comprising SEQ ID NO: 488 and (b) a spacer sequence selected from any one of SEQ ID NOs: 1000-1399. In some embodiments, the system further comprises (c) an intermediary sequence comprising SEQ ID NO: 489 or (d) a handle sequence comprising SEQ ID NO: 490. In some embodiments, the guide RNA sequence comprises any one of SEQ ID NOs: 1570-1969.

[0365] In some embodiments, the effector protein consists of a sequence selected from any one of SEQ ID NOs: 773, 775, or 793, wherein the effector protein is fused to a KRAB domain, a methyltransferase, or a combination thereof, and the guide RNA consists of (a) a repeat sequence consisting of SEQ ID NO: 488 and (b) a spacer sequence consisting a sequence selected from of any one of SEQ ID NOs: 1000-1399. In some embodiments, the system further comprises (c) an intermediary sequence consisting of SEQ ID NO: 489 or (d) a handle sequence consisting of SEQ ID NO: 490. In some embodiments, the guide RNA sequence consists of a sequence selected from any one of SEQ ID NOs: 1570-1969.

[0366] In some embodiments, the effector protein comprises an amino acid sequence that is at least 90%, at least, 91%, at least 92%, at least 93%, at least 94%, at least 95%, at least 96%, at least 97%, at least 98%, or at least 99% identical a sequence selected from to any one of SEQ ID NOs: 773, 775, and 793, wherein the effector protein is fused to a base editing enzyme, and the guide RNA comprises (a) a repeat sequence that is at least 90%, at least, 91%, at least 92%, at least 93%, at least 94%, at least 95%, at least 96%, at least 97%, at least 98%, or at least 99% identical to SEQ ID NO: 488, and (b) a spacer sequence that is at least 90%, at least, 91%, at least 92%, at least 93%, at least 94%, at least 95%, at least 96%, at least 97%, at least 98%, or at least 99% identical to a sequence selected from any one of SEQ ID NOs: 2018-2026. In some embodiments, the system further comprises (c) an intermediary sequence that is at least 90%, at least, 91%, at least 92%, at least 93%, at least 94%, at least 95%, at least 96%, at least 97%, at least 98%, or at least 99% identical to SEQ ID NO: 489 and (d) a handle sequence that is at least 90%, at least, 91%, at least 92%, at least 93%, at least 94%, at least 95%, at least 96%, at least 97%, at least 98%, or at least 99% identical to SEQ ID NO: 490. In some embodiments, the guide RNA sequence is at least 90%, at least, 91%, at least 92%, at least 93%, at least 94%, at least 95%, at least 96%, at least 97%, at least 98%, or at least 99% identical to a sequence selected from any one of SEQ ID NOs: 2075-2083.

[0367] In some embodiments, the effector protein comprises a sequence selected from any one of SEQ ID NOs: 773, 775, and 793, wherein the effector protein is fused to a base editing enzyme, and the guide RNA comprises (a) a repeat sequence comprising SEQ ID NO: 488 and (b) a spacer sequence selected from any one of SEQ ID NOs: 2018-2026. In some embodiments, the system further comprises (c) an intermediary sequence comprising SEQ ID NO: 489 or (d) a handle sequence comprising SEQ ID NO: 490. In some embodiments, the guide RNA sequence comprising a sequence selected from any one of SEQ ID NOs: 2075-2083.

[0368] In some embodiments, the effector protein consists of a sequence selected from any one of SEQ ID NOs: 773, 775, or 793, wherein the effector protein is fused to a base editing enzyme, and the guide RNA consists of (a) a repeat sequence consisting of SEQ ID NO: 488 and (b) a spacer sequence consisting of a sequence selected from any one of SEQ ID NOs: 2018-2026. In some embodiments, the system further comprises (c) an intermediary sequence comprising SEQ ID NO: 489 or (d) a handle sequence comprising SEQ ID NO: 490. In some embodiments, the guide RNA sequence consists of a sequence selected from any one of SEQ ID NOs: 2075-2083.

### Exemplary PCSK9 Systems

[0369] In some embodiments, the present disclosure provides a system comprising (1) a guide RNA or a polynucleotide encoding the same, wherein the guide RNA comprises a spacer sequence that is capable of hybridizing to a target nucleic acid sequence in the PCSK9 gene; and (2) an effector protein or fusion protein thereof or a polynucleotide encoding the same.

[0370] In some embodiments, the effector protein comprises an amino acid sequence that is at least 90%, at least, 91%, at least 92%, at least 93%, at least 94%, at least 95%, at least 96%, at least 97%, at least 98%, or at least 99% identical to any one of the sequences recited in TABLEs 15, 18, and 19, and the guide RNA comprises (a) a repeat sequence that is at least 90%, at least, 91%, at least 92%, at least 93%, at least 94%, at least 95%, at least 96%, at least 97%, at least 98%, or at least 99% identical to a sequence selected from any one of SEQ ID NOs: 16 and 38-43 and (b) a spacer sequence that is at least 90%, at least, 91%, at least 92%, at least 93%, at least 94%, at least 95%, at least 96%, at least 97%, at least 98%, or at least 99% identical to a sequence selected from any one of SEQ ID NOs: 79-140, 208, 799-803, and 809. In some embodiments, the guide RNA sequence is at least 90%, at least, 91%, at least 92%, at least 93%, at least 94%, at least 95%, at least 96%, at least 97%, at least 98%, or at least 99% identical to a sequence selected from any one of SEQ ID NOs: 141-202, 492-493, 810-814, and 820.

[0371] In some embodiments, the effector protein comprises any one of the sequences recited in TABLEs 15, 18, and 19, and the guide RNA comprises (a) a repeat sequence comprising a sequence selected from any one of SEQ ID NOs: 16 and 38-43 and (b) a spacer sequence selected from any one of SEQ ID NOs: 79-140, 208, 799-803, and 809. In some embodiments, the guide RNA sequence comprises any one of SEQ ID NOs: 141-202, 492-493, 810-814, and 820.

[0372] In some embodiments, the effector protein consists of any one of the sequences recited in TABLEs 15, 18, or 19, and the guide RNA consists of (a) a repeat sequence consisting of a sequence selected from any one of SEQ ID NOs: 16 or 38-43 and (b) a spacer sequence consisting of a sequence selected from any one of SEQ ID NOs: 79-140, 208, 799-803, or 809. In some embodiments, the guide RNA sequence consists of a sequence selected from any one of SEQ ID NOs: 141-202, 492-493, 810-814, or 820.

[0373] In some embodiments, the effector protein comprises an amino acid sequence that is at least 90%, at least, 91%, at least 92%, at least 93%, at least 94%, at least 95%, at least 96%, at least 97%, at least 98%, or at least 99% identical to a sequence selected from any one of SEQ ID NOs: 32, 34, 794, and 2090, and (2) a guide RNA comprises (a) a repeat sequence that is at least 90%, at least, 91%, at least 92%, at least 93%, at least 94%, at least 95%, at least 96%, at least 97%, at least 98%, or at least 99% identical to a sequence selected from any one of SEQ ID NOs: 16 and 38-43 and (b) a spacer sequence that is at least 90%, at least, 91%, at least 92%, at least 93%, at least 94%, at least 95%, at least 96%, at least 97%, at least 98%, or at least 99% identical to a sequence selected from any one of SEQ ID NOs: 79-140, 208, 799-803, and 809. In some embodiments, the guide RNA sequence is at least 90%, at least, 91%, at least 92%, at least 93%, at least 94%, at least 95%, at least 96%, at least 97%, at least 98%, or at least 99% identical to a sequence selected from any one of SEQ ID NOs: 141-202, 492-493, 810-814, and 820.

[0374] In some embodiments, the effector protein comprises a sequence selected from any one of SEQ ID NOs: 32, 34, 794, and 2090, and the guide RNA comprises (a) a repeat sequence comprising a sequence selected from any one of SEQ ID NOs: 16 and 38-43 and (b) a spacer sequence comprising a sequence selected from any one of SEQ ID NOs: 79-140, 208, 799-803, and 809. In some embodiments, the guide RNA sequence comprises any one of SEQ ID NOs: 141-202, 492-493, 810-814, and 820.

[0375] In some embodiments, the effector protein consists of any one of SEQ ID NOs: 32, 34, 794, or 2090, and the guide RNA consists of (a) a repeat sequence consisting of a sequence selected from any one of SEQ ID NOs: 16 or 38-43 and (b) a spacer sequence consisting of a sequence selected from any one of SEQ ID NOs: 79-140, 208, 799-803, or 809. In some embodiments, the guide RNA sequence consists of a sequence selected from any one of SEQ ID NOs: 141-202, 492-493, 810-814, or 820.

[0376] In some embodiments, the effector protein comprises an amino acid sequence that is at least 90%, at least, 91%, at least 92%, at least 93%, at least 94%, at least 95%, at least 96%, at least 97%, at least 98%, or at least 99% identical to any one of the sequences recited in TABLEs 15, 16, and 17, and the guide RNA comprises (a) a repeat sequence that is at least 90%, at least, 91%, at least 92%, at least 93%, at least 94%, at least 95%, at least 96%, at least 97%, at least 98%, or at least 99% identical to SEQ ID NO: 488, and (b) a spacer sequence that is at least 90%, at least, 91%, at least 92%, at least 93%, at least 94%, at least 95%, at least 96%, at least 97%, at least 98%, or at least 99% identical to a sequence selected from any one of SEQ ID NOs: 300-487, 822, and 1970-1995. In some embodiments, the system further comprises (c) an intermediary sequence that is at least 90%, at least, 91%, at least 92%, at least 93%, at least 94%, at least 95%, at least 96%, at least 97%, at least 98%, or at least 99% identical to SEQ ID NO: 489 and (d) a handle sequence that is at least 90%, at least, 91%, at least 92%, at least 93%, at least 94%, at least 95%, at least 96%, at least 97%, at least 98%, or at least 99% identical to SEQ ID NO: 490. In some embodiments, the guide RNA sequence is at least 90%, at least, 91%, at least 92%, at least 93%, at least 94%, at least 95%, at least 96%, at least 97%, at least 98%, or at least 99% identical to a sequence selected from any one of SEQ ID NOs: 585-772, 829, and 2027-2052.

[0377] In some embodiments, the effector protein comprises any one of the sequences recited in TABLEs 15, 16, and 17, and the guide RNA comprises (a) a repeat sequence comprising SEQ ID NO: 488 and (b) a spacer sequence selected from any one of SEQ ID NOs: 300-487, 822, and 1970-1995. In some embodiments, the system further comprises (c) an intermediary sequence comprising SEQ ID NO: 489 and (d) a handle sequence comprising SEQ ID NO: 490. In some embodiments, the guide RNA sequence comprises any one of SEQ ID NOs: 585-772, 829, and 2027-2052.

[0378] In some embodiments, the effector protein consists of any one of the sequences recited in TABLEs 15, 16, or 17, and the guide RNA consists of (a) a repeat sequence consisting of SEQ ID NO: 488 and (b) a spacer sequence consisting of a sequence selected from any one of SEQ ID NOs: 300-487, 822, or 1970-1995. In some embodiments, the system further comprises (c) an intermediary sequence consisting of SEQ ID NO: 489 or (d) a handle sequence consisting of SEQ ID NO: 490. In some embodiments, the guide RNA sequence consists of a sequence selected from any one of SEQ ID NOs: 585-772, 829, or 2027-2052.

[0379] In some embodiments, the effector protein comprises an amino acid sequence that is at least 90%, at least, 91%, at least 92%, at least 93%, at least 94%, at least 95%, at least 96%, at least 97%, at least 98%, or at least 99% identical to a sequence selected from any one of SEQ ID NOs: 773, 775, and 793, and the guide RNA comprises (a) a repeat sequence that is at least 90%, at least, 91%, at least 92%, at least 93%, at least 94%, at least 95%, at least 96%, at least 97%, at least 98%, or at least 99% identical to SEQ ID NO: 488, and (b) a spacer sequence that is at least 90%, at least, 91%, at least 92%, at least 93%, at least 94%, at least 95%, at least 96%, at least 97%, at least 98%, or at least 99% identical to a sequence selected from any one of SEQ ID NOs: 300-487, 822, and 1970-1995. In some embodiments, the system further comprises (c) an intermediary sequence that is at least 90%, at least, 91%, at least 92%, at least 93%, at least 94%, at least 95%, at least 96%, at least 97%, at least 98%, or at least 99% identical to SEQ ID NO: 489 or (d) a handle sequence that is at least 90%, at least, 91%, at least 92%, at least 93%, at least 94%, at least 95%, at least 96%, at least 97%, at least 98%, or at least 99% identical to SEQ ID NO: 490. In some embodiments, the guide RNA sequence is at least 90%, at least, 91%, at least 92%, at least 93%, at least 94%, at least 95%, at least 96%, at least 97%, at least 98%, or at least 99% identical to a sequence selected from any one of SEQ ID NOs: 585-772, 829, and 2027-2052.

[0380] In some embodiments, the effector protein comprises a sequence selected from any one of SEQ ID NOs: 773, 775, and 793, and the guide RNA comprises (a) a repeat sequence comprising SEQ ID NO: 488 and (b) a spacer sequence selected from any one of SEQ ID NOs: 300-487, 822, and 1970-1995. In some embodiments, the system further comprises (c) an intermediary sequence comprising SEQ ID NO: 489 or (d) a handle sequence comprising SEQ ID NO: 490. In some embodiments, the guide RNA sequence comprises any one of SEQ ID NOs: 585-772, 829, and 2027-2052.

[0381] In some embodiments, the effector protein consists of a sequence selected from any one of SEQ ID NOs: 773, 775, or 793, and the guide RNA consists of (a) a repeat sequence consisting of SEQ ID NO: 488 and (b) a spacer sequence consisting of a sequence selected from any one of SEQ ID NOs: 300-487, 822, or 1970-1995. In some embodiments, the system further comprises (c) an intermediary sequence consisting of SEQ ID NO: 489 or (d) a handle sequence consisting of SEQ ID NO: 490. In some embodiments, the guide RNA sequence consists of a sequence selected from any one of SEQ ID NOs: 585-772, 829, or 2027-2052.

[0382] In some embodiments, the effector protein comprises an amino acid sequence that is at least 90%, at least, 91%, at least 92%, at least 93%, at least 94%, at least 95%, at least 96%, at least 97%, at least 98%, or at least 99% identical to a sequence selected from any one of SEQ ID NOs: 773, 775, and 793, wherein the effector protein is fused to a base editing enzyme, and the guide RNA comprises (a) a repeat sequence that is at least 90%, at least, 91%, at least 92%, at least 93%, at least 94%, at least 95%, at least 96%, at least 97%, at least 98%, or at least 99% identical to SEQ ID NO: 488, and (b) a spacer sequence that is at least 90%, at least, 91%, at least 92%, at least 93%, at least 94%, at least 95%, at least 96%, at least 97%, at least 98%, or at least 99% identical to a sequence selected from any one of SEQ ID NOs: 1970-1995. In some embodiments, the system further comprises (c) an intermediary sequence that is at least 90%, at least, 91%, at least 92%, at least 93%, at least 94%, at least 95%, at least 96%, at least 97%, at least 98%, or at least 99% identical to SEQ ID NO: 489 or (d) a handle sequence that is at least 90%, at least, 91%, at least 92%, at least 93%, at least 94%, at least 95%, at least 96%, at least 97%, at least 98%, or at least 99% identical to SEQ ID NO: 490. In some embodiments, the guide RNA sequence is at least 90%, at least, 91%, at least 92%, at least 93%, at least 94%, at least 95%, at least 96%, at least 97%, at least 98%, or at least 99% identical to a sequence selected from any one of SEQ ID NOs: 2027-2052.

[0383] In some embodiments, the effector protein comprises a sequence selected from any one of SEQ ID NOs: 773, 775, and 793, wherein the effector protein is fused to a base editing enzyme, and the guide RNA comprises (a) a repeat sequence comprising SEQ ID NO: 488 and (b) a spacer sequence selected from any one of SEQ ID NOs: 1970-1995. In some embodiments, the system further comprises (c) an intermediary sequence comprising SEQ ID NO: 489 or (d) a handle sequence comprising SEQ ID NO: 490. In some embodiments, the guide RNA sequence comprises any one of SEQ ID NOs: 2027-2052.

[0384] In some embodiments, the effector protein consists of a sequence selected from any one of SEQ ID NOs: 773, 775, or 793, wherein the effector protein is fused to a base editing enzyme, and the guide RNA consists of (a) a repeat sequence consisting of SEQ ID NO: 488 and (b) a spacer sequence consisting of a sequence selected from any one of SEQ ID NOs: 1970-1995. In some embodiments, the system further comprises (c) an intermediary sequence consisting of SEQ ID NO: 489 or (d) a handle sequence consisting of SEQ ID NO: 490. In some embodiments, the guide RNA sequence consists of a sequence selected from any one of SEQ ID NOs: 2027-2052.

### Exemplary ANGPTL3 Systems

[0385] In some embodiments, the present disclosure provides a system comprising (1) a guide RNA or a polynucleotide encoding the same, wherein the guide RNA comprises a spacer sequence that is capable of hybridizing to a target nucleic acid sequence in the ANGPTL3 gene; and (2) an effector protein or fusion protein thereof or a polynucleotide encoding the same.

[0386] In some embodiments, the effector protein comprises an amino acid sequence that is at least 90%, at least, 91%, at least 92%, at least 93%, at least 94%, at least 95%, at least 96%, at least 97%, at least 98%, or at least 99% identical to any one of the sequences recited in TABLEs 15, 18, and 19, and the guide RNA comprises (a) a repeat sequence that is at least 90%, at least, 91%, at least 92%, at least 93%, at least 94%, at least 95%, at least 96%, at least 97%, at least 98%, or at least 99% identical to a sequence selected from any one of SEQ ID NOs: 16 and 38-43 and (b) a spacer sequence that is at least 90%, at least, 91%, at least 92%, at least 93%, at least 94%, at least 95%, at least 96%, at least 97%, at least 98%, at least 99% identical to a sequence selected from any one of SEQ ID NOs: 806-808. In some embodiments, the guide RNA sequence is at least 90%, at least, 91%, at least 92%, at least 93%, at least 94%, at least 95%, at least 96%, at least 97%, at least 98%, or at least 99% identical to a sequence selected from any one of SEQ ID NOs: 817-819.

[0387] In some embodiments, the effector protein comprises any one of the sequences recited in TABLEs 15, 18, and 19, and the guide RNA comprises (a) a repeat sequence comprising a sequence selected from any one of SEQ ID NOs: 16 and 38-43 and (b) a spacer sequence selected from any one of SEQ ID NOs: 806-808. In some embodiments, the guide RNA sequence comprises any one of SEQ ID NOs: 817-819.

[0388] In some embodiments, the effector protein consists of any one of the sequences recited in TABLEs 15, 18, or 19, and the guide RNA consists of (a) a repeat sequence consisting of a sequence selected from any one of SEQ ID NOs: 16 or 38-43 and (b) a spacer sequence consisting of a sequence selected from any one of SEQ ID NOs: 806-808. In some embodiments, the guide RNA sequence consists of a sequence selected from any one of SEQ ID NOs: 817-819.

[0389] In some embodiments, the effector protein comprises an amino acid sequence that is at least 90%, at least, 91%, at least 92%, at least 93%, at least 94%, at least 95%, at least 96%, at least 97%, at least 98%, or at least 99% identical to a sequence selected from any one of SEQ ID NOs: 32, 34, 794, and 2090, and the guide RNA comprises (a) a repeat sequence that is at least 90%, at least, 91%, at least 92%, at least 93%, at least 94%, at least 95%, at least 96%, at least 97%, at least 98%, at least 99% identical to a sequence selected from any one of SEQ ID NOs: 16 and 38-43 and (b) a spacer sequence that is at least 90%, at least, 91%, at least 92%, at least 93%, at least 94%, at least 95%, at least 96%, at least 97%, at least 98%, at least 99% identical to a sequence selected from any one of SEQ ID NOs: 806-808. In some embodiments, the guide RNA sequence is at least 90%, at least, 91%, at least 92%, at least 93%, at least 94%, at least 95%, at least 96%, at least 97%, at least 98%, or at least 99% identical to a sequence selected from any one of SEQ ID NOs: 817-819.

[0390] In some embodiments, the effector protein comprises a sequence selected from any one of SEQ ID NOs: 32, 34, 794, and 2090, and the guide RNA comprises (a) a repeat sequence comprising a sequence selected from any one of SEQ ID NOs: 16 and 38-43 and (b) a spacer sequence selected from any one of SEQ ID NOs: 806-808. In some embodiments, the guide RNA sequence comprises any one of SEQ ID NOs: 817-819.

[0391] In some embodiments, the effector protein consists of a sequence selected from any one of SEQ ID NOs: 32, 34, 794, or 2090, and the guide RNA consists of (a) a repeat sequence consisting of a sequence selected from any one of SEQ ID NOs: 16 or 38-43 and (b) a spacer sequence consisting of a sequence selected from any one of SEQ ID NOs: 806-808. In some embodiments, the guide RNA sequence consists of a sequence selected from any one of SEQ ID NOs: 817-819.

[0392] In some embodiments, the effector protein comprises an amino acid sequence that is at least 90%, at least, 91%, at least 92%, at least 93%, at least 94%, at least 95%, at least 96%, at least 97%, at least 98%, or at least 99% identical to any one of the sequences recited in TABLEs 15, 16, and 17, and the guide RNA comprises (a) a repeat sequence that is at least 90%, at least, 91%, at least 92%, at least 93%, at least 94%, at least 95%, at least 96%, at least 97%, at least 98%, or at least 99% identical to SEQ ID NO: 488, and (b) a spacer sequence that is at least 90%, at least, 91%, at least 92%, at least 93%, at least 94%, at least 95%, at least 96%, at least 97%, at least 98%, or at least 99% identical to a sequence selected from any one of SEQ ID NOs: 1996-2017. In some embodiments, the system further comprises (c) an intermediary sequence that is at least 90%, at least, 91%, at least 92%, at least 93%, at least 94%, at least 95%, at least 96%, at least 97%, at least 98%, or at least 99% identical to SEQ ID NO: 489 and (d) a handle sequence that is at least 90%, at least, 91%, at least 92%, at least 93%, at least 94%, at least 95%, at least 96%, at least 97%, at least 98%, or at least 99% identical to SEQ ID NO: 490. In some embodiments, the guide RNA sequence is at least 90%, at least, 91%, at least 92%, at least 93%, at least 94%, at least 95%, at least 96%, at least 97%, at least 98%, or at least 99% identical to a sequence selected from any one of SEQ ID NOs: 2053-2074.

[0393] In some embodiments, the effector protein comprises any one of the sequences recited in TABLEs 15, 16, and 17, and the guide RNA comprises (a) a repeat sequence comprising SEQ ID NO: 488 and (b) a spacer sequence selected from any one of SEQ ID NOs: 1996-2017. In some embodiments, the system further comprises (c) an intermediary sequence comprising SEQ ID NO: 489 and (d) a handle sequence comprising SEQ ID NO: 490. In some embodiments, the guide RNA sequence comprises any one of SEQ ID NOs: 2053-2074.

[0394] In some embodiments, the effector protein consists of any one of the sequences recited in TABLEs 15, 16, or 17, and the guide RNA consists of (a) a repeat sequence consisting of SEQ ID NO: 488 and (b) a spacer sequence consisting of a sequence selected from any one of SEQ ID NOs: 1996-2017. In some embodiments, the system further comprises (c) an intermediary sequence consisting of SEQ ID NO: 489 or (d) a handle sequence consisting of SEQ ID NO: 490. In some embodiments, the guide RNA sequence consists of a sequence selected from any one of SEQ ID NOs: 2053-2074.

[0395] In some embodiments, the effector protein comprises an amino acid sequence that is at least 90%, at least, 91%, at least 92%, at least 93%, at least 94%, at least 95%, at least 96%, at least 97%, at least 98%, or at least 99% identical to a sequence selected from any one of SEQ ID NOs: 773, 775, and 793, and the guide RNA comprises (a) a repeat sequence that is at least 90%, at least, 91%, at least 92%, at least 93%, at least 94%, at least 95%, at least 96%, at least 97%, at least 98%, or at least 99% identical to SEQ ID NO: 488, and (b) a spacer sequence that is at least 90%, at least, 91%, at least 92%, at least 93%, at least 94%, at least 95%, at least 96%, at least 97%, at least 98%, or at least 99% identical to a sequence selected from any one of SEQ ID NOs: 1996-2017. In some embodiments, the system further comprises (c) an intermediary sequence that is at least 90%, at least, 91%, at least 92%, at least 93%, at least 94%, at least 95%, at least 96%, at least 97%, at least 98%, or at least 99% identical to SEQ ID NO: 489 or (d) a handle sequence that is at least 90%, at least, 91%, at least 92%, at least 93%, at least 94%, at least 95%, at least 96%, at least 97%, at least 98%, or at least 99% identical to SEQ ID NO: 490. In some embodiments, the guide RNA sequence is at least 90%, at least, 91%, at least 92%, at least 93%, at least 94%, at least 95%, at least 96%, at least 97%, at least 98%, or at least 99% identical to a sequence selected from any one of SEQ ID NOs: 2053-2074.

[0396] In some embodiments, the effector protein comprises a sequence selected from any one of SEQ ID NOs: 773, 775, and 793, and the guide RNA comprises (a) a repeat sequence comprising SEQ ID NO: 488 and (b) a spacer sequence selected from any one of SEQ ID NOs: 1996-2017. In some embodiments, the system further comprises (c) an intermediary sequence comprising SEQ ID NO: 489 or (d) a handle sequence comprising SEQ ID NO: 490. In some embodiments, the guide RNA sequence comprises any one of SEQ ID NOs: 2053-2074.

[0397] In some embodiments, the effector protein consists of a sequence selected from any one of SEQ ID NOs: 773, 775, or 793, and the guide RNA consists of (a) a repeat sequence consisting of SEQ ID NO: 488 and (b) a spacer sequence consisting of a sequence selected from any one of SEQ ID NOs: 1996-2017. In some embodiments, the system further comprises (c) an intermediary sequence consisting of SEQ ID NO: 489 or (d) a handle sequence consisting of SEQ ID NO: 490. In some embodiments, the guide RNA sequence consists of a sequence selected from any one of SEQ ID NOs: 2053-2074.

[0398] In some embodiments, the effector protein comprises an amino acid sequence that is at least 90%, at least, 91%, at least 92%, at least 93%, at least 94%, at least 95%, at least 96%, at least 97%, at least 98%, or at least 99% identical to a sequence selected from any one of SEQ ID NOs: 773, 775, and 793, wherein the effector protein is fused to a base editing enzyme, and the guide RNA comprises (a) a repeat sequence that is at least 90%, at least, 91%, at least 92%, at least 93%, at least 94%, at least 95%, at least 96%, at least 97%, at least 98%, or at least 99% identical to SEQ ID NO: 488, and (b) a spacer sequence that is at least 90%, at least, 91%, at least 92%, at least 93%, at least 94%, at least 95%, at least 96%, at least 97%, at least 98%, or at least 99% identical to a sequence selected from any one of SEQ ID NOs: 1996-2017. In some embodiments, the system further comprises (c) an intermediary sequence that is at least 90%, at least, 91%, at least 92%, at least 93%, at least 94%, at least 95%, at least 96%, at least 97%, at least 98%, or at least 99% identical to SEQ ID NO: 489 or (d) a handle sequence that is at least 90%, at least, 91%, at least 92%, at least 93%, at least 94%, at least 95%, at least 96%, at least 97%, at least 98%, or at least 99% identical to SEQ ID NO: 490. In some embodiments, the guide RNA sequence is at least 90%, at least, 91%, at least 92%, at least 93%, at least 94%, at least 95%, at least 96%, at least 97%, at least 98%, or at least 99% identical to a sequence selected from any one of SEQ ID NOs: 2053-2074.

[0399] In some embodiments, the effector protein comprises a sequence selected from any one of SEQ ID NOs: 773, 775, and 793, wherein the effector protein is fused to a base editing enzyme, and the guide RNA comprises (a) a repeat sequence comprising SEQ ID NO: 488 and (b) a spacer sequence selected from any one of SEQ ID NOs: 1996-2017. In some embodiments, the system further comprises (c) an intermediary sequence comprising SEQ ID NO: 489 or (d) a handle sequence comprising SEQ ID NO: 490. In some embodiments, the guide RNA sequence comprises any one of SEQ ID NOs: 2053-2074.

[0400] In some embodiments, the effector protein consists of a sequence selected from any one of SEQ ID NOs: 773, 775, or 793, wherein the effector protein is fused to a base editing enzyme, and the guide RNA consists of (a) a repeat sequence consisting of SEQ ID NO: 488 and (b) a spacer sequence consisting of a sequence selected from any one of SEQ ID NOs: 1996-2017. In some embodiments, the system further comprises (c) an intermediary sequence consisting of SEQ ID NO: 489 or (d) a handle sequence consisting of SEQ ID NO: 490. In some embodiments, the guide RNA sequence consisting of a sequence selected from any one of SEQ ID NOs: 2053-2074.

### 6. Target Nucleic Acids

[0401] Disclosed herein are compositions, systems, and methods for detecting and/or editing a target nucleic acid (e.g., the APOC3, the PCSK9, or the ANGPTL3 genes).

[0402] In some embodiments, the target nucleic acid is the APOC3 gene or a portion thereof. In some embodiments, the target nucleic acid is a gene that encodes the apolipoprotein C3 (APOC3) protein. In general, guide nucleic acids described herein comprise a sequence that is complementary to and/or hybridizes to a target sequence of the APOC3 gene. Exemplary reference sequence for the APOC3 gene are provided in TABLE 24. The target sequence of the APOC3 gene may be a portion of the APOC3 gene that encodes the APOC3 protein. Exemplary reference sequence for the APOC3 protein are listed in TABLE 25.

TABLE 24
Exemplary reference APOC3 genes

HGNC: 610; NCBI Entrez Gene: 354; Ensembl: ENSG00000110245; MIM: 107720;
UniProtKB/Swiss-Prot: P02656; RefSeq NM_000040.3; RefSeq NG_008949.1

TABLE 25
Exemplary reference APOC3 proteins

NCBI Reference Sequence: NP_000031.1;
Protein Accession: AJA40867.1; Protein Accession: AAB59372; GenBank: AAI34420.1

[0403] In some embodiments, the target nucleic acid is the PCSK9 gene or a portion thereof. In some embodiments, the target nucleic acid is a gene that encodes the Proprotein convertase subtilisin/kexin type 9 (PCSK9) protein. In general, guide nucleic acids described herein comprise a sequence that is complementary to and/or hybridizes to a target sequence of the PCSK9 gene. Exemplary reference sequence for the PCSK9 gene are provided in TABLE 26. The target sequence of the PCSK9 gene may be a portion of the PCSK9 gene that encodes the PCSK9 protein. Exemplary reference sequence for the PCSK9 protein are listed in TABLE 27.

TABLE 26
Exemplary reference PCSK9 genes

HGNC: 20001; NCBI Entrez Gene: 255738; Ensembl: ENSG00000169174; MIM: 607786;
UniProtKB/Swiss-Prot: Q8NBP7; RefSeq NM_174936.4; RefSeq NG_009061.1

TABLE 27
Exemplary reference PCSK9 proteins

NCBI Reference Sequence: NP_777596;
Protein Accession: Q8NBP7

[0404] In some embodiments, the target nucleic acid is the ANGPTL3 gene or a portion thereof. In some embodiments, the target nucleic acid is a gene that encodes the Angiopoietin-like 3 (ANGPTL3) protein. In general, guide nucleic acids described herein comprise a sequence that is complementary to and/or hybridizes to a target sequence of the ANGPTL3 gene. Exemplary reference sequence for the ANGPTL3 gene are provided in TABLE 28. The target sequence of the ANGPTL3 gene may be a portion of the ANGPTL3 gene that encodes the ANGPTL3 protein. Exemplary reference sequence for the ANGPTL3 protein are listed in TABLE 29.

TABLE 28
Exemplary reference ANGPTL3 genes

HGNC: 491; NCBI Entrez Gene: 27329; Ensembl: ENSG00000132855; MIM: 604774;
UniProtKB/Swiss-Prot: Q9Y5C1; RefSeq NM_ NM_014495; RefSeq NG_ NG_028169

TABLE 29
Exemplary reference ANGPTL3 proteins

NCBI Reference Sequence: NP_055310;
Protein Accession: Q9Y5C1

### Certain Samples

[0405] Systems, compositions, and methods described herein may be useful for detecting a mutated APOC3, PCSK9, or ANGPTL3 gene in a sample. In some embodiments, the sample is a biological sample, an environmental sample, or a combination thereof. Non-limiting examples of biological samples are blood, serum, plasma, saliva, urine, mucosal sample, peritoneal sample, cerebrospinal fluid, gastric secretions, nasal secretions, sputum, pharyngeal exudates, urethral or vaginal secretions, an exudate, an effusion, and a tissue sample (e.g., a biopsy sample). A tissue sample from a subject may be dissociated or liquified prior to application to detection system of the present disclosure. Non-limiting examples of environmental samples are soil, air, or water. In some embodiments, an environmental sample is taken as a swab from a surface of interest or taken directly from the surface of interest.

### 7. Vectors

[0406] Compositions, systems, and methods described herein comprise a vector or a use thereof. A vector can comprise a nucleic acid of interest (e.g., an APOC3-targeting guide nucleic acid, a PCSK9-targeting guide nucleic acid, an ANGPTL3-targeting guide nucleic acid, or polynucleotide encoding the same). In some embodiments, the nucleic acid of interest comprises one or more components of a composition or system described herein (e.g., an APOC3-targeting guide nucleic acid, a PCSK9-targeting guide nucleic acid, an ANGPTL3-targeting guide nucleic acid, or polynucleotide encoding the same). In some embodiments, the nucleic acid of interest comprises a nucleotide sequence that encodes one or more components of the composition or system described herein. In some embodiments, one or more components comprises a polypeptide(s), guide nucleic acid(s), target nucleic acid(s), and donor nucleic acid(s). In some embodiments, the component comprises a nucleic acid encoding an effector protein and a guide nucleic acid or a nucleic acid encoding the guide nucleic acid. The vector may be part of a vector system, wherein a vector system comprises a library of vectors each encoding one or more component of a composition or system described herein. In some embodiments, components described herein (e.g., an effector protein, a guide nucleic acid, and/or a target nucleic acid) are encoded by the same vector. In some embodiments, components described herein (e.g., an effector protein, a guide nucleic acid, and/or a target nucleic acid) are each encoded by different vectors of the system.

[0407] In some embodiments, a vector comprises a nucleotide sequence encoding one or more effector proteins as described herein. In some embodiments, the one or more effector proteins comprise at least two effector proteins. In some embodiments, the at least two effector protein are the same. In some embodiments, the at least two effector proteins are different from each other. In some embodiments, the nucleotide sequence is operably linked to a promoter that is operable in a target cell, such as a eukaryotic cell. In some embodiments, the vector comprises the nucleotide sequence encoding 1, 2, 3, 4, 5, 6, 7, 8, 9, 10, 11, 12, 13, 14, 15, 16, 17, 18, 19, 20, 21, 22, 23, 24, 25, 26, 27, 28, 29, 30, 31, 32, 33, 34, 35, 36, 37, 38, 39, 40, 41, 42, 43, 44, 45, 46, 47, 48, 49, 50 or more effector proteins.

[0408] In some embodiments, a vector may encode one or more of any system components, including but not limited to effector proteins, guide nucleic acids, donor nucleic acids, and target nucleic acids as described herein. In some embodiments, a system component encoding sequence is operably linked to a promoter that is operable in a target cell, such as a eukaryotic cell. In some embodiments, a vector may encode 1, 2, 3, 4 or more of any system components. For example, a vector may encode two or more guide nucleic acids, wherein each guide nucleic acid comprises a different sequence. A vector may comprise the nucleic acid encoding an effector protein and a guide nucleic acid. A vector may encode an effector protein, a guide nucleic acid, and a donor nucleic acid.

[0409] In some embodiments, a vector comprises one or more guide nucleic acids, or a nucleotide sequence encoding the one or more guide nucleic acids as described herein (e.g., an APOC3-targeting guide nucleic acid, a PCSK9-targeting guide nucleic acid, an ANGPTL3-targeting guide nucleic acid, or polynucleotide encoding the same). In some embodiments, the one or more guide nucleic acids comprise at least two guide nucleic acids. In some embodiments, the at least two guide nucleic acids are the same. In some embodiments, the at least two guide nucleic acids are different from each other. In some embodiments, the guide nucleic acid or the nucleotide sequence encoding the guide nucleic acid is operably linked to a promoter that is operable in a target cell, such as a eukaryotic cell. In some embodiments, the vector comprises 1, 2, 3, 4, 5, 6, 7, 8, 9, 10, 11, 12, 13, 14, 15, 16, 17, 18, 19, 20, 21, 22, 23, 24, 25, 26, 27, 28, 29, 30, 31, 32, 33, 34, 35, 36, 37, 38, 39, 40, 41, 42, 43, 44, 45, 46, 47, 48, 49, 50 or more guide nucleic acids. In some embodiments, the vector comprises a nucleotide sequence encoding 1, 2, 3, 4, 5, 6, 7, 8, 9, 10, 11, 12, 13, 14, 15, 16, 17, 18, 19, 20, 21, 22, 23, 24, 25, 26, 27, 28, 29, 30, 31, 32, 33, 34, 35, 36, 37, 38, 39, 40, 41, 42, 43, 44, 45, 46, 47, 48, 49, 50 or more guide nucleic acids.

[0410] In some embodiments, a vector may comprise or encode one or more regulatory elements. Regulatory elements may refer to transcriptional and translational control sequences, such as promoters, enhancers, polyadenylation signals, terminators, protein degradation signals, and the like, that provide for and/or regulate transcription of a non-coding sequence or a coding sequence and/or regulate translation of an encoded polypeptide. In some embodiments, a vector may comprise or encode for one or more additional elements, such as, for example, replication origins, antibiotic resistance (or a nucleic acid encoding the same), a tag (or a nucleic acid encoding the same), selectable markers, and the like. In some embodiments, a vector comprises or encodes for one or more elements, such as, for example, ribosome binding sites, and RNA splice sites.

[0411] Vectors described herein can encode a promoter—a regulatory region on a nucleic acid, such as a DNA sequence, capable of initiating transcription of a downstream (3′ direction) coding or non-coding sequence. A promoter can be linked at its 3′ terminus to a nucleic acid, the expression or transcription of which is desired, and extends upstream (5′ direction) to include bases or elements necessary to initiate transcription or induce expression, which could be measured at a detectable level. A promoter can comprise a nucleotide sequence, referred to herein as a “promoter sequence.” The promoter sequence can include a transcription initiation site, and one or more protein binding domains responsible for the binding of transcription machinery, such as RNA polymerase. When eukaryotic promoters are used, such promoters can contain “TATA” boxes and “CAT” boxes. Various promoters, including inducible promoters, may be used to drive expression, i.e., transcriptional activation, of the nucleic acid of interest. Accordingly, in some embodiments, the nucleic acid of interest can be operably linked to a promoter.

[0412] Promotors may be any suitable type of promoter envisioned for the compositions, systems, and methods described herein. Examples include constitutively active promoters (e.g., CMV promoter), inducible promoters (e.g., heat shock promoter, tetracycline-regulated promoter, steroid-regulated promoter, metal-regulated promoter, estrogen receptor-regulated promoter, etc.), spatially restricted and/or temporally restricted promoters (e.g., a tissue specific promoter, a cell type specific promoter, etc.), etc. Suitable promoters include, but are not limited to: SV40 early promoter, mouse mammary tumor virus long terminal repeat (LTR) promoter; adenovirus major late promoter (Ad MLP); a herpes simplex virus (HSV) promoter, a cytomegalovirus (CMV) promoter such as the CMV immediate early promoter region (CMVIE), a rous sarcoma virus (RSV) promoter, a human U6 small nuclear promoter (U6), an enhanced U6 promoter, and a human H1 promoter (H1). By transcriptional activation, it is intended that transcription will be increased above basal levels in the target cell by 2 fold, 5 fold, 10 fold, 50 fold, by 100 fold, 500 fold, or by 1000 fold, or more. In addition, vectors used for providing a nucleic acid that, when transcribed, produces a guide nucleic acid and/or a nucleic acid that encodes an effector protein to a cell may include nucleic acid sequences that encode for selectable markers in the target cells, so as to identify cells that have taken up the guide nucleic acid and/or the effector protein.

[0413] In general, vectors provided herein comprise at least one promotor or a combination of promoters driving expression or transcription of one or more genome editing tools described herein. In some embodiments, the vector comprises a nucleotide sequence of a promoter. In some embodiments, the vector comprises two promoters. In some embodiments, the vector comprises three promoters. In some embodiments, the length of the promoter is less than about 500, less than about 400, less than about 300, or less than about 200 linked nucleotides. In some embodiments, a length of the promoter is at least 100, at least 200, at least 300, at least 400, or at least 500 linked nucleotides. Non-limiting examples of promoters include CMV, 7SK, EF1a, RPBSA, hPGK, EFS, SV40, PGK1, Ubc, human beta actin promoter, CAG, TRE, UAS, Ac5, Polyhedrin, CaMKIIa, GAL1-10, H1, TEF1, GDS, ADH1, HSV TK, Ubi, U6, MNDU3, MSCV, MND and CAG. In some embodiments, the promoter allows for expression in a liver cell.

[0414] In some embodiments, the promoter is a constitutive promoter. In some embodiments, the promoter is an inducible promoter. In some embodiments, the inducible promoter only drives expression of its corresponding coding sequence (e.g., polypeptide or guide nucleic acid) when a signal is present, e.g., a hormone, a small molecule, a peptide. Non-limiting examples of inducible promoters are the T7 RNA polymerase promoter, the T3 RNA polymerase promoter, the Isopropyl-beta-D-thiogalactopyranoside (IPTG)-regulated promoter, a lactose induced promoter, a heat shock promoter, a tetracycline-regulated promoter (tetracycline-inducible or tetracycline-repressible), a steroid regulated promoter, a metal-regulated promoter, and an estrogen receptor-regulated promoter. In some embodiments, the promoter is an activation-inducible promoter, such as a CD69 promoter. In some embodiments, the promoter for expressing effector protein is a muscle-specific promoter. In some embodiments, the muscle-specific promoter comprises Ck8e, SPC5-12, Mb, or Desmin promoter sequence. In some embodiments, the promoter for expressing effector protein is a ubiquitous promoter. In some embodiments, the ubiquitous promoter comprises MND or CAG promoter sequence.

[0415] In some embodiments, the promoters are prokaryotic promoters (e.g., drive expression of a gene in a prokaryotic cell). In some embodiments, the promoters are eukaryotic promoters, (e.g., drive expression of a gene in a eukaryotic cell). In some embodiments, the promoter is EF1a. In some embodiments, the promoter is ubiquitin. In some embodiments, vectors are bicistronic or polycistronic vector (e.g., having or involving two or more loci responsible for generating a protein) having an internal ribosome entry site (IRES) is for translation initiation in a cap-independent manner.

[0416] In some embodiments, a vector described herein is a nucleic acid expression vector. In some embodiments, a vector described herein is a recombinant expression vector. In some embodiments, a vector described herein is a messenger RNA.

[0417] In some embodiments, the expression vector comprises the DNA molecule encoding a guide nucleic acid. In some embodiments, the expression vector further comprises the nucleic acid encoding an effector protein. In some embodiments, the expression vector further comprises or encodes a donor nucleic acid. In some embodiments, the expression vector encoding a guide nucleic acid, wherein the guide nucleic acid comprises a first region comprising a repeat; and a second region comprising a spacer sequence that is complementary to a target sequence of an APOC3 gene. In some embodiments, wherein the first region is located 5′ of the second region. In some embodiments, the expression vector further comprises an effector protein that binds the repeat sequence or a nucleic acid encoding the effector protein. In some embodiments, the spacer comprises a nucleotide sequence that is at least 70%, at least 75%, at least 80%, at least 85%, at least 90%, at least 95%, or 100% identical to a sequence selected from SEQ ID NOs: 1-15, 67-72, 207, 804-805, and 830-999; the repeat sequence comprises a nucleotide sequence that is at least 70%, at least 75%, at least 80%, at least 85%, at least 90%, at least 95%, or 100% identical to a sequence selected from SEQ ID NOs: 16, and 38-43; the effector protein comprises an amino acid sequence that is at least 65%, at least 70%, at least 75%, at least 80%, at least 85%, at least 90%, at least 95%, at least 97%, at least 98%, at least 99%, or 100% identical to any sequence listed in TABLES 15, 18, and 19; or a combination thereof. In some embodiments, the spacer comprises a nucleotide sequence that is at least 70%, at least 75%, at least 80%, at least 85%, at least 90%, at least 95%, or 100% identical to a sequence selected from SEQ ID NOs: 209-299, 823-825, 1000-1399, 2018-2026, and 2084-2086; the repeat sequence comprises a nucleotide sequence that is at least 70%, at least 75%, at least 80%, at least 85%, at least 90%, at least 95%, or 100% identical to SEQ ID NO: 488; the effector protein comprises an amino acid sequence that is at least 65%, at least 70%, at least 75%, at least 80%, at least 85%, at least 90%, at least 95%, at least 97%, at least 98%, at least 99%, or 100% identical to any sequence listed in TABLES 15-17; or a combination thereof.

[0418] In some embodiments, the expression vector encoding a guide nucleic acid, wherein the guide nucleic acid comprises a first region comprising a repeat; and a second region comprising a spacer sequence that is complementary to a target sequence of a PCSK9 gene. In some embodiments, wherein the first region is located 5′ of the second region. In some embodiments, the expression vector further comprises an effector protein that binds the repeat sequence or a nucleic acid encoding the effector protein. In some embodiments, the spacer comprises a nucleotide sequence that is at least 70%, at least 75%, at least 80%, at least 85%, at least 90%, at least 95%, or 100% identical to a sequence selected from SEQ ID NOs: 79-140, 208, 799-803, and 809; the repeat sequence comprises a nucleotide sequence that is at least 70%, at least 75%, at least 80%, at least 85%, at least 90%, at least 95%, or 100% identical to a sequence selected from SEQ ID NOs: 16, and 38-43; the effector protein comprises an amino acid sequence that is at least 65%, at least 70%, at least 75%, at least 80%, at least 85%, at least 90%, at least 95%, at least 97%, at least 98%, at least 99%, or 100% identical to any sequence listed in TABLES 15, 18, and 19; or a combination thereof. In some embodiments, the spacer comprises a nucleotide sequence that is at least 70%, at least 75%, at least 80%, at least 85%, at least 90%, at least 95%, or 100% identical to a sequence selected from SEQ ID NOs: 300-487, 822 and 1970-1995; the repeat sequence comprises a nucleotide sequence that is at least 70%, at least 75%, at least 80%, at least 85%, at least 90%, at least 95%, or 100% identical to SEQ ID NO: 488; the effector protein comprises an amino acid sequence that is at least 65%, at least 70%, at least 75%, at least 80%, at least 85%, at least 90%, at least 95%, at least 97%, at least 98%, at least 99%, or 100% identical to any sequence listed in TABLES 15-17; or a combination thereof.

[0419] In some embodiments, the expression vector encoding a guide nucleic acid, wherein the guide nucleic acid comprises a first region comprising a repeat; and a second region comprising a spacer sequence that is complementary to a target sequence of a ANGPTL3 gene. In some embodiments, wherein the first region is located 5′ of the second region. In some embodiments, the expression vector further comprises an effector protein that binds the repeat sequence or a nucleic acid encoding the effector protein. In some embodiments, the spacer comprises a nucleotide sequence that is at least 70%, at least 75%, at least 80%, at least 85%, at least 90%, at least 95%, or 100% identical to a sequence selected from SEQ ID NOs: 806-808; the repeat sequence comprises a nucleotide sequence that is at least 70%, at least 75%, at least 80%, at least 85%, at least 90%, at least 95%, or 100% identical to a sequence selected from SEQ ID NOs: 16, and 38-43; the effector protein comprises an amino acid sequence that is at least 65%, at least 70%, at least 75%, at least 80%, at least 85%, at least 90%, at least 95%, at least 97%, at least 98%, at least 99%, or 100% identical to any sequence listed in TABLES 15, 18, and 19; or a combination thereof. In some embodiments, the spacer comprises a nucleotide sequence that is at least 70%, at least 75%, at least 80%, at least 85%, at least 90%, at least 95%, or 100% identical to a sequence selected from SEQ ID NOs: 1996-2017; the repeat sequence comprises a nucleotide sequence that is at least 70%, at least 75%, at least 80%, at least 85%, at least 90%, at least 95%, or 100% identical to SEQ ID NO: 488; the effector protein comprises an amino acid sequence that is at least 65%, at least 70%, at least 75%, at least 80%, at least 85%, at least 90%, at least 95%, at least 97%, at least 98%, at least 99%, or 100% identical to any sequence listed in TABLES 15-17; or a combination thereof.

[0420] In some embodiments, a vector described herein is a delivery vector. In some embodiments, the delivery vector is a eukaryotic vector, a prokaryotic vector (e.g., a bacterial vector) a viral vector, or any combination thereof. In some embodiments, the delivery vehicle is a non-viral vector. In some embodiments, the delivery vector is a plasmid. In some embodiments, the plasmid comprises DNA. In some embodiments, the plasmid comprises RNA. In some embodiments, the plasmid comprises circular double-stranded DNA. In some embodiments, the plasmid is linear. In some embodiments, the plasmid comprises one or more coding sequences of interest and one or more regulatory elements. In some embodiments, the plasmid comprises a bacterial backbone containing an origin of replication and an antibiotic resistance gene or other selectable marker for plasmid amplification in bacteria. In some embodiments, the plasmid is a minicircle plasmid. In some embodiments, the plasmid contains one or more genes that provide a selective marker to induce a target cell to retain the plasmid. In some examples, the plasmids are engineered through synthetic or other suitable means known in the art. For example, in some embodiments, the genetic elements are assembled by restriction digest of the desired genetic sequence from a donor plasmid or organism to produce ends of the DNA which is then be readily ligated to another genetic sequence.

[0421] In some embodiments, vectors comprise an enhancer. Enhancers are nucleotide sequences that have the effect of enhancing promoter activity. In some embodiments, enhancers augment transcription regardless of the orientation of their sequence. In some embodiments, enhancers activate transcription from a distance of several kilo basepairs. Furthermore, enhancers are located optionally upstream or downstream of a gene region to be transcribed, and/or located within the gene, to activate the transcription. Exemplary enhancers include, but are not limited to, WPRE; CMV enhancers; the R-U5′ segment in LTR of HTLV-I.

[0422] In some embodiments, disclosed herein comprise one or more nucleic acids encoding an effector protein, fusion effector protein, fusion partner, a guide nucleic acid, or a combination thereof. The effector protein, fusion effector protein, fusion partner protein, or combination thereof may be any one of those described herein. In some embodiments, of the above, the nucleic acid expression vector comprises a polynucleotide encoding an effector protein that is at least 80%, at least 85%, at least 90%, at least 95%, at least 99%, or 100% identical to any one of the sequences recited in TABLES 15-19.

[0423] The one or more nucleic acids may comprise a plasmid. The one or more nucleic acids may comprise a nucleic acid expression vector. The one or more nucleic acids may comprise a viral vector. In some embodiments, the viral vector is a lentiviral vector. In some embodiments, the vector is an adeno-associated viral (AAV) vector. In some embodiments, compositions, including pharmaceutical compositions, comprise a viral vector encoding a fusion effector protein and a guide nucleic acid, wherein at least a portion of the guide nucleic acid binds to the effector protein of the fusion effector protein. In some embodiments, pharmaceutical compositions comprise one or more nucleic acids encoding an effector protein, fusion effector protein, fusion partner, a guide nucleic acid, or a combination thereof; and a pharmaceutically acceptable carrier or diluent.

### Administration of a Non-Viral Vector

[0424] In some embodiments, an administration of a non-viral vector comprises contacting a cell, such as a host cell, with the non-viral vector. In some embodiments, a physical method or a chemical method is employed for delivering the vector into the cell. Exemplary physical methods include electroporation, gene gun, sonoporation, magnetofection, or hydrodynamic delivery. Exemplary chemical methods include delivery of the recombinant polynucleotide by liposomes such as, cationic lipids or neutral lipids; lipofection; dendrimers; lipid nanoparticle (LNP); or cell-penetrating peptides.

[0425] In some embodiments, a vector is administered as part of a method of nucleic acid detection, editing, and/or treatment as described herein. In some embodiments, a vector is administered in a single vehicle, such as a single expression vector. In some embodiments, at least two of the three components, a nucleic acid encoding one or more effector proteins, one or more donor nucleic acids, and one or more guide nucleic acids or a nucleic acid encoding the one or more guide nucleic acid, are provided in the single expression vector. In some embodiments, components, such as a guide nucleic acid and an effector protein, are encoded by the same vector.

[0426] In some embodiments, an effector protein (or a nucleic acid encoding same) and/or an engineered guide nucleic acid (or a nucleic acid that, when transcribed, produces same) are not co-administered with donor nucleic acid in a single vehicle. In some embodiments, an effector protein (or a nucleic acid encoding same), an engineered guide nucleic acid (or a nucleic acid that, when transcribed, produces same), and/or donor nucleic acid are administered in one or more or two or more vehicles, such as one or more, or two or more expression vectors.

[0427] In some embodiments, a vector may be part of a vector system. In some embodiments, the vector system comprises a library of vectors each encoding one or more components of a composition or system described herein. In some embodiments, a vector system is administered as part of a method of nucleic acid detection, editing, and/or treatment as described herein, wherein at least two vectors are co-administered. In some embodiments, the at least two vectors comprise different components. In some embodiments, the at least two vectors comprise the same component having different sequences. In some embodiments, at least one of the three components, a nucleic acid encoding one or more effector proteins, one or more donor nucleic acids, and one or more guide nucleic acids or a nucleic acid encoding the one or more guide nucleic acids, or a variant thereof is provided in a different vector. In some embodiments, the nucleic acid encoding the effector protein, and a guide nucleic acid or a nucleic acid encoding the guide nucleic acid are provided in different vectors. In some embodiments, the donor nucleic acid is encoded by a different vector than the vector encoding the effector protein and the guide nucleic acid.

### Lipid Particles and Non-Viral Vectors

[0428] In some embodiments, compositions and systems provided herein comprise a lipid particle. In some embodiments, a lipid particle is a lipid nanoparticle (LNP). In some embodiments, a lipid or a lipid nanoparticle can encapsulate an expression vector as described herein. LNPs are a non-viral delivery system for delivery of the composition and/or system components described herein. LNPs are particularly effective for delivery of nucleic acids. Beneficial properties of LNP include ease of manufacture, low cytotoxicity and immunogenicity, high efficiency of nucleic acid encapsulation and cell transfection, multi-dosing capabilities and flexibility of design (Kulkarni et al., (2018) Nucleic Acid Therapeutics, 28(3):146-157). In some embodiments, compositions and methods comprise a lipid, polymer, nanoparticle, or a combination thereof, or use thereof, to introduce one or more effector proteins, one or more guide nucleic acids, one or more donor nucleic acids, or any combinations thereof to a cell. Non-limiting examples of lipids and polymers are cationic polymers, cationic lipids, ionizable lipids, or bio-responsive polymers. In some embodiments, the ionizable lipids exploits chemical-physical properties of the endosomal environment (e.g., pH) offering improved delivery of nucleic acids. In some embodiments, the ionizable lipids are neutral at physiological pH. In some embodiments, the ionizable lipids are protonated under acidic pH. In some embodiments, the bio-responsive polymer exploits chemical-physical properties of the endosomal environment (e.g., pH) to preferentially release the genetic material in the intracellular space.

[0429] In some embodiments, a LNP comprises an outer shell and an inner core. In some embodiments, the outer shell comprises lipids. In some embodiments, the lipids comprise modified lipids. In some embodiments, the modified lipids comprise pegylated lipids. In some embodiments, the lipids comprise one or more of cationic lipids, anionic lipids, ionizable lipids, and non-ionic lipids. In some embodiments, the LNP comprises one or more of N1,N3,N5-tris(3-(didodecylamino)propyl)benzene-1,3,5-tricarboxamide (TT3), 2-dioleoyl-sn-glycero-3-phosphoethanolamine (DOPE), 1-palmitoyl-2-oleoylsn-glycero-3-phosphoethanolamine (POPE), 1,2-distearoyl-sn-glycero-3-phosphocholine (DSPC), cholesterol (Chol), 1,2-dimyristoyl-sn-glycerol, and methoxypolyethylene glycol (DMG-PEG), derivatives, analogs, or variants thereof. In some embodiments, the LNP has a negative net overall charge prior to complexation with one or more of a guide nucleic acid, a nucleic acid encoding the one or more guide nucleic acid, a nucleic acid encoding the effector protein, and/or a donor nucleic acid. In some embodiments, the inner core is a hydrophobic core. In some embodiments, the one or more of a guide nucleic acid, the nucleic acid encoding the one or more guide nucleic acid, the nucleic acid encoding the effector protein, and/or the donor nucleic acid forms a complex with one or more of the cationic lipids and the ionizable lipids. In some embodiments, the nucleic acid encoding the effector protein or the nucleic acid encoding the guide nucleic acid is self-replicating.

[0430] In some embodiments, a LNP comprises one or more of cationic lipids, ionizable lipids, and modified versions thereof. In some embodiments, the ionizable lipid comprises TT3 or a derivative thereof. Accordingly, in some embodiments, the LNP comprises one or more of TT3 and pegylated TT3. The publication WO2016187531 is hereby incorporated by reference in its entirety, which describes representative LNP formulations in Table 2 and Table 3, and representative methods of delivering LNP formulations in Example 7.

[0431] In some embodiments, a LNP comprises a lipid composition targeting to a specific organ. In some embodiments, the lipid composition comprises lipids having a specific alkyl chain length that controls accumulation of the LNP in the specific organ (e.g., liver or spleen). In some embodiments, the lipid composition comprises a biomimetic lipid that controls accumulation of the LNP in the specific organ (e.g., brain). In some embodiments, the lipid composition comprises lipid derivatives (e.g., cholesterol derivatives) that controls accumulation of the LNP in a specific cell (e.g., liver endothelial cells, Kupffer cells, hepatocytes).

### Delivery of Viral Vectors

[0432] In some embodiments, a vector described herein comprises a viral vector. In some embodiments, the viral vector comprises a nucleic acid to be delivered into a host cell by a recombinantly produced virus or viral particle. The nucleic acid may be single-stranded or double stranded, linear or circular, segmented or non-segmented. The nucleic acid may comprise DNA, RNA, or a combination thereof. In some embodiments, the vector is an adeno-associated viral vector. There are a variety of viral vectors that are associated with various types of viruses, including but not limited to retroviruses (e.g., lentiviruses and γ-retroviruses), adenoviruses, arenaviruses, alphaviruses, adeno-associated viruses (AAVs), baculoviruses, vaccinia viruses, herpes simplex viruses and poxviruses. In some embodiments, the vector is an adeno-associated viral (AAV) vector. In some embodiments, the viral vector is a recombinant viral vector. In some embodiments, the vector is a retroviral vector. In some embodiments, the retroviral vector is a lentiviral vector. In some embodiments, the retroviral vector comprises gamma-retroviral vector. A viral vector provided herein may be derived from or based on any such virus. For example, in some embodiments, the gamma-retroviral vector is derived from a Moloney Murine Leukemia Virus (MoMLV, MMLV, MuLV, or MLV) or a Murine Stem cell Virus (MSCV) genome. In some embodiments, the lentiviral vector is derived from the human immunodeficiency virus (HIV) genome. In some embodiments, the viral vector is a chimeric viral vector. In some embodiments, the chimeric viral vector comprises viral portions from two or more viruses. In some embodiments, the viral vector corresponds to a virus of a specific serotype.

[0433] In some embodiments, a viral vector is an adeno-associated viral vector (AAV vector). In some embodiments, a viral particle that delivers a viral vector described herein is an AAV. In some embodiments, the AAV comprises any AAV known in the art. In some embodiments, the viral vector corresponds to a virus of a specific AAV serotype. In some embodiments, the AAV serotype is selected from an AAV1 serotype, an AAV2 serotype, AAV3 serotype, an AAV4 serotype, AAV5 serotype, an AAV6 serotype, AAV7 serotype, an AAV8 serotype, an AAV9 serotype, an AAV10 serotype, an AAV11 serotype, an AAV12 serotype, an AAV-rh10 serotype, and any combination, derivative, or variant thereof. In some embodiments, the AAV vector is a recombinant vector, a hybrid AAV vector, a chimeric AAV vector, a self-complementary AAV (scAAV) vector, a single-stranded AAV, or any combination thereof. scAAV genomes are generally known in the art and contain both DNA strands which can anneal together to form double-stranded DNA.

[0434] In some embodiments, an AAV vector described herein is a chimeric AAV vector. In some embodiments, the chimeric AAV vector comprises an exogenous amino acid or an amino acid substitution, or capsid proteins from two or more serotypes. In some examples, a chimeric AAV vector may be genetically engineered to increase transduction efficiency, selectivity, or a combination thereof.

[0435] In some embodiments, AAV vector described herein comprises two inverted terminal repeats (ITRs). According, in some embodiments, the viral vector provided herein comprises two inverted terminal repeats of AAV. A nucleotide sequence between the ITRs of an AAV vector provided herein comprises a sequence encoding genome editing tools. In some embodiments, the genome editing tools comprise a nucleic acid encoding one or more effector proteins, a nucleic acid encoding one or more fusion proteins (e.g., a nuclear localization signal (NLS), polyA tail), one or more guide nucleic acids, a nucleic acid encoding the one or more guide nucleic acids, respective promoter(s), one or more donor nucleic acid, or any combinations thereof. In some embodiments, viral vectors provided herein comprise at least one promotor or a combination of promoters driving expression or transcription of one or more genome editing tools described herein. In some embodiments, a coding region of the AAV vector forms an intramolecular double-stranded DNA template thereby generating the AAV vector that is a self-complementary AAV (scAAV) vector. In some embodiments, the scAAV vector comprises the sequence encoding genome editing tools that has a length of about 2 kb to about 3 kb. In some embodiments, the AAV vector provided herein is a self-inactivating AAV vector. In some embodiments, the AAV vector provided herein comprises a modification, such as an insertion, deletion, chemical alteration, or synthetic modification, relative to a wild-type AAV vector.

### Producing AAV Delivery Vectors

[0436] In some embodiments, methods of producing AAV delivery vectors herein comprise packaging a nucleic acid encoding an effector protein and a guide nucleic acid, or a combination thereof, into an AAV vector. In some embodiments, methods of producing the delivery vector comprises, (a) contacting a cell with at least one nucleic acid encoding: (i) a guide nucleic acid; (ii) a Replication (Rep) gene; and (iii) a Capsid (Cap) gene that encodes an AAV capsid protein; (b) expressing the AAV capsid protein in the cell; (c) assembling an AAV particle; and (d) packaging an effector encoding nucleic acid into the AAV particle, thereby generating an AAV delivery vector. In some embodiments, promoters, stuffer sequences, and any combination thereof may be packaged in the AAV vector. In some examples, the AAV vector may package 1, 2, 3, 4, or 5 guide nucleic acids or copies thereof. In some embodiments, the AAV vector comprises inverted terminal repeats, e.g., a 5′ inverted terminal repeat and a 3′ inverted terminal repeat. In some embodiments, the AAV vector comprises a mutated inverted terminal repeat that lacks a terminal resolution site.

[0437] In some embodiments, a hybrid AAV vector is produced by transcapsidation, e.g., packaging an inverted terminal repeat (ITR) from a first serotype into a capsid of a second serotype, wherein the first and second serotypes may be not the same. In some examples, the Rep gene and ITR from a first AAV serotype (e.g., AAV2) may be used in a capsid from a second AAV serotype (e.g., AAV9), wherein the first and second AAV serotypes may be not the same. As a non-limiting example, a hybrid AAV serotype comprising the AAV2 ITRs and AAV9 capsid protein may be indicated AAV2/9. In some examples, the hybrid AAV delivery vector comprises an AAV2/1, AAV2/2, AAV 2/4, AAV2/5, AAV2/8, or AAV2/9 vector.

[0438] In some embodiments, the AAV vector comprises a recombinant AAV expression cassette comprising sequences encoding: a) a first inverted terminal repeat (ITR) and a first promoter; b) an effector protein disclosed herein; c) optionally a second promoter; d) a second polynucleotide encoding a guide nucleic acid disclosed here; and e) a second ITR. In some embodiments, the AAV expression cassette is a self-complementary AAV vector.

### Producing AAV Particles

[0439] In some embodiments, AAV particles described herein are recombinant AAV (rAAV). In some embodiments, rAAV particles are generated by transfecting AAV producing cells with an AAV-containing plasmid carrying the sequence encoding the genome editing tools, a plasmid that carries viral encoding regions, i.e., Rep and Cap gene regions; and a plasmid that provides the helper genes such as E1A, E1B, E2A, E40RF6 and VA. In some embodiments, the AAV producing cells are mammalian cells. In some embodiments, host cells for rAAV viral particle production are mammalian cells. In some embodiments, a mammalian cell for rAAV viral particle production is a COS cell, a HEK293T cell, a HeLa cell, a KB cell, a derivative thereof, or a combination thereof. In some embodiments, rAAV virus particles can be produced in the mammalian cell culture system by providing the rAAV plasmid to the mammalian cell. In some embodiments, producing rAAV virus particles in a mammalian cell can comprise transfecting vectors that express the rep protein, the capsid protein, and the gene-of-interest expression construct flanked by the ITR sequence on the 5′ and 3′ ends. Methods of such processes are provided in, for example, Naso et al., BioDrugs, 2017 August; 31(4):317-334 and Benskey et al., (2019), Methods Mol Biol., 1937:3-26, each of which is incorporated by reference in their entireties.

[0440] In some embodiments, rAAV is produced in a non-mammalian cell. In some embodiments, rAAV is produced in an insect cell. In some embodiments, the insect cell for producing rAAV viral particles comprises a Sf9 cell. In some embodiments, production of rAAV virus particles in insect cells can comprise baculovirus. In some embodiments, production of rAAV virus particles in insect cells can comprise infecting the insect cells with three recombinant baculoviruses, one carrying the cap gene, one carrying the rep gene, and one carrying the gene-of-interest expression construct enclosed by an ITR on both the 5′ and 3′ end. In some embodiments, rAAV virus particles are produced by the One Bac system. In some embodiments, rAAV virus particles can be produced by the Two Bac system. In some embodiments, in the Two Bac system, the rep gene and the cap gene of the AAV is integrated into one baculovirus virus genome, and the ITR sequence and the gene-of-interest expression construct is integrated into another baculovirus virus genome. In some embodiments, in the One Bac system, an insect cell line that expresses both the rep protein and the capsid protein is established and infected with a baculovirus virus integrated with the ITR sequence and the gene-of-interest expression construct. Details of such processes are provided in, for example, Smith et. al., (1983), Mol. Cell. Biol., 3(12):2156-65; Urabe et al., (2002), Hum. Gene. Ther., 1; 13(16):1935-43; and Benskey et al., (2019), Methods Mol Biol., 1937:3-26, each of which is incorporated by reference in its entirety.

### 8. Pharmaceutical Compositions and Modes of Administration

[0441] Disclosed herein are compositions comprising one or more effector proteins described herein or nucleic acids encoding the one or more effector proteins, one or more guide nucleic acids described herein or nucleic acids encoding the one or more guide nucleic acids described herein (e.g., APOC3-targeting guide nucleic acids, a PCSK9-targeting guide nucleic acid, a ANGPTL3-targeting guide nucleic acid, or polynucleotides encoding the same), or combinations thereof. In some embodiments, a repeat sequence of the one or more guide nucleic acids are capable of interacting with the one or more of the effector proteins. In some embodiments, spacer sequences of the one or more guide nucleic acids hybridizes with a target sequence of a target nucleic acid. In some embodiments, the compositions are capable of editing a target nucleic acid in a cell or a subject. In some embodiments, the compositions are capable of editing a target nucleic acid or the expression thereof in a cell, in a tissue, in an organ, in vitro, in vivo, or ex vivo. In some embodiments, the compositions are capable of editing a target nucleic acid in a sample comprising the target nucleic.

[0442] In some embodiments, compositions described herein comprise plasmids described herein, viral vectors described herein, non-viral vectors described herein, or combinations thereof. In some embodiments, compositions described herein comprise the viral vectors. In some embodiments, compositions described herein comprise an AAV. In some embodiments, compositions described herein comprise liposomes (e.g., cationic lipids or neutral lipids), dendrimers, lipid nanoparticle (LNP), or cell-penetrating peptides. In some embodiments, compositions described herein comprise an LNP.

[0443] In some embodiments, compositions described herein are pharmaceutical compositions. In some embodiments, the pharmaceutical compositions comprise compositions described herein and a pharmaceutically acceptable carrier or diluent. Non-limiting examples of pharmaceutically acceptable carriers and diluents suitable for the pharmaceutical compositions disclosed herein include buffers (e.g., neutral buffered saline, phosphate buffered saline); carbohydrates (e.g., glucose, mannose, sucrose, dextran, mannitol); polypeptides or amino acids (e.g., glycine); antioxidants; chelating agents (e.g., EDTA, glutathione); adjuvants (e.g., aluminum hydroxide); surfactants (Polysorbate 80, Polysorbate 20, or Pluronic F68); glycerol; sorbitol; mannitol; polyethylene glycol; and preservatives. In some embodiments, the vector is formulated for delivery through injection by a needle carrying syringe. In some embodiments, the composition is formulated for delivery by electroporation. In some embodiments, the composition is formulated for delivery by chemical method. In some embodiments, the pharmaceutical compositions comprise a virus vector or a non-viral vector.

[0444] Pharmaceutical compositions described herein comprise a salt. In some embodiments, the salt is a sodium salt. In some embodiments, the salt is a potassium salt. In some embodiments, the salt is a magnesium salt. In some embodiments, the salt is NaCl. In some embodiments, the salt is KNO₃. In some embodiments, the salt is Mg²⁺SO₄²⁻.

[0445] Pharmaceutical compositions described herein are in the form of a solution (e.g., a liquid). In some embodiments, the solution is formulated for injection, e.g., intravenous or subcutaneous injection. In some embodiments, the pH of the solution is about 7, about 7.1, about 7.2, about 7.3, about 7.4, about 7.5, about 7.6, about 7.7, about 7.8, about 7.9, about 8, about 8.1, about 8.2, about 8.3, about 8.4, about 8.5, about 8.6, about 8.7, about 8.8, about 8.9, or about 9. In some embodiments, the pH is 7 to 7.5, 7.5 to 8, 8 to 8.5, 8.5 to 9, or 7 to 8.5. In some cases, the pH of the solution is less than 7. In some cases, the pH is greater than 7.

[0446] Disclosed herein, in some embodiments, are pharmaceutical compositions for modifying a target nucleic acid in a cell or a subject, comprising any one of the effector proteins, engineered effector proteins, fusion effector proteins, or guide nucleic acids as described herein and any combination thereof. Also disclosed herein, are pharmaceutical compositions comprising a nucleic acid encoding any one of the effector proteins, engineered effector proteins, fusion effector proteins, or guide nucleic acids as described herein and any combination thereof. Also disclosed herein, are pharmaceutical compositions comprising the nucleic acid expression vector, the cell, or the population of cells disclosed herein. In some embodiments, pharmaceutical compositions comprise a plurality of guide nucleic acids. In some embodiments, the pharmaceutical composition disclosed herein also comprise a pharmaceutical acceptable carrier. Pharmaceutical compositions may be used to modify a target nucleic acid or the expression thereof in a cell in vitro, in vivo, or ex vivo. In some embodiments, pharmaceutical compositions comprise one or more nucleic acids encoding an effector protein, fusion effector protein, fusion partner, a guide nucleic acid, or a combination thereof; and a pharmaceutically acceptable carrier or diluent. The effector protein, fusion effector protein, fusion partner protein, or combination thereof may be any one of those described herein.

### 9. Methods of Detecting a Target Nucleic Acid

[0447] Provided herein are methods of detecting target nucleic acids. Methods may comprise detecting target nucleic acids with compositions or systems described herein. Methods may comprise detecting a target nucleic acid in a sample, e.g., a cell lysate, a biological fluid, or environmental sample. Methods may comprise detecting a target nucleic acid in a cell. In some embodiments, methods of detecting a target nucleic acid in a sample or cell comprises contacting the sample or cell with an effector protein or a multimeric complex thereof, a guide nucleic acid, wherein at least a portion of the guide nucleic acid is complementary to at least a portion of the target nucleic acid, and a reporter nucleic acid that is cleaved in the presence of the effector protein, the guide nucleic acid, and the target nucleic acid, and detecting a signal produced by cleavage of the reporter nucleic acid, thereby detecting the target nucleic acid in the sample. In some embodiments, methods result in trans cleavage of the reporter nucleic acid. In some embodiments, methods result in cis cleavage of the reporter nucleic acid.

### 10. Methods of Nucleic Acid Modification

[0448] Provided herein are methods of editing and/or modifying a target nucleic acid (e.g., a target nucleic acid in the APOC3, PCSK9, or ANGPTL3 genes). In general, editing refers to modifying the nucleobase sequence of a target nucleic acid. However, compositions and systems disclosed herein may also be capable of making epigenetic modifications of target nucleic acids. Effector proteins, multimeric complexes thereof and systems described herein may be used for editing or modifying a target nucleic acid. Editing a target nucleic acid may comprise one or more of: cleaving the target nucleic acid, deleting one or more nucleotides of the target nucleic acid, inserting one or more nucleotides into the target nucleic acid, mutating one or more nucleotides of the target nucleic acid, or modifying (e.g., methylating, demethylating, deaminating, or oxidizing) of one or more nucleotides of the target nucleic acid.

[0449] Methods of editing may comprise contacting a target nucleic acid with an effector protein described herein and a guide nucleic acid, wherein the effector protein comprises an amino acid sequence that is at least 70%, at least 75%, at least 80%, at least 85%, at least 90%, at least 95%, at least 97%, or at least 98%, at least 99%, or 100% identical to any one of the sequences set forth in TABLES 15, 18, and 19. In some embodiments, the effector protein comprises an amino acid sequence that is at least 70%, at least 75%, at least 80%, at least 85%, at least 90%, at least 95%, at least 97%, at least 98%, at least 99%, or 100% identical to any one of the sequences set forth in TABLES 15, 18, and 19, wherein the amino acid residue at position 26, relative to SEQ ID NO: 32, remains unchanged. In some embodiments, the effector protein comprises an amino acid substitution relative to SEQ ID NO: 32 selected from the group consisting of L26R, E109R, H208R, K184R, K38R, L182R, Q183R, S108R, S198R, and T114R. In some embodiments, the effector protein is a dCas protein. In some embodiments, the dCas protein comprises an amino acid substation D369A, D369N, D658A, D658N, E567A, and E567Q relative to SEQ ID NO: 32. In some embodiments, the guide nucleic acid comprises a nucleotide sequence that is at least 70%, at least 75%, at least 80%, at least 85%, at least 90%, at least 92%, at least 95%, or 100% identical to any one of the sequences set forth in TABLES 8-10. In some embodiments, the guide nucleic acid comprises a spacer sequence that is at least 70%, at least 75%, at least 80%, at least 85%, at least 90%, at least 92%, at least 95%, or 100% identical to any one of the sequences set forth in TABLES 1, 3, and 5 and a repeat sequence that is at least 70%, at least 75%, at least 80%, at least 85%, at least 90%, at least 92%, at least 95%, or 100% identical to the sequence set forth in SEQ ID NOs: 16 or 38-43.

[0450] Methods of editing may comprise contacting a target nucleic acid with an effector protein described herein and a guide nucleic acid, wherein the effector protein comprises an amino acid sequence that is at least 70%, at least 75%, at least 80%, at least 85%, at least 90%, at least 95%, at least 97%, or at least 98%, at least 99%, or 100% identical to any one of the sequences set forth in TABLES 15-17. In some embodiments, the effector protein comprises an amino acid sequence that is at least 70%, at least 75%, at least 80%, at least 85%, at least 90%, at least 95%, at least 97%, at least 98%, at least 99%, or 100% identical to any one of the sequences set forth in TABLES 15-17, wherein the amino acid residue at position 220, relative to SEQ ID NO: 773, remains unchanged. In some embodiments, the effector protein comprises an amino acid substitution relative to SEQ ID NO: 773 selected from the group consisting of D220R, N286K, E225K, 180K, S209F, Y315M, N193K, M298L, M295W, A306K, A218K, and K58W. In some embodiments, the effector protein is a dCas protein. In some embodiments, the dCas protein comprises an amino acid substation of E335Q, D237A D418A, D418N, and E335A relative to SEQ ID NO: 773. In some embodiments, the guide nucleic acid comprises a nucleotide sequence that is at least 70%, at least 75%, at least 80%, at least 85%, at least 90%, at least 92%, at least 95%, or 100% identical to any one of the sequences set forth in TABLES 11-13. In some embodiments, the guide nucleic acid comprises a spacer sequence that is at least 70%, at least 75%, at least 80%, at least 85%, at least 90%, at least 92%, at least 95%, or 100% identical to any one of the sequences set forth in TABLES 2, 4, AND 6 and a repeat sequence that is at least 70%, at least 75%, at least 80%, at least 85%, at least 90%, at least 92%, at least 95%, or 100% identical to SEQ ID NO: 488. In some embodiments, the guide nucleic acid comprises a handle sequence that is at least 70%, at least 75%, at least 80%, at least 85%, at least 90%, at least 92%, at least 95%, or 100% identical to SEQ ID NO: 490. In some embodiments, the guide nucleic acid comprises an intermediary sequence that is at least 70%, at least 75%, at least 80%, at least 85%, at least 90%, at least 92%, at least 95%, or 100% identical to SEQ ID NO: 489.

[0451] Editing may introduce a mutation (e.g., point mutations, deletions) in a target nucleic acid relative to a corresponding wildtype nucleobase sequence. Editing may remove or correct a disease-causing mutation in a nucleic acid sequence to produce a corresponding wildtype nucleobase sequence. Editing may remove/correct point mutations, deletions, null mutations, or tissue-specific mutations in a target nucleic acid. Editing may be used to generate gene knock-out, gene knock-in, gene editing, gene tagging, or a combination thereof. Methods of the disclosure may be targeted to any locus in a genome of a cell.

[0452] Editing may comprise single stranded cleavage, double stranded cleavage, donor nucleic acid insertion, epigenetic modification (e.g., methylation, demethylation, acetylation, or deacetylation), or a combination thereof. In some embodiments, cleavage (single-stranded or double-stranded) is site-specific, meaning cleavage occurs at a specific site in the target nucleic acid, often within the region of the target nucleic acid that hybridizes with the guide nucleic acid spacer region. In some embodiments, the target nucleic acid, and the resulting cleaved nucleic acid is contacted with a nucleic acid for homologous recombination (e.g., homology directed repair (HDR)) or non-homologous end joining (NHEJ). In some cases, a double-stranded break in the target nucleic acid may be repaired (e.g., by NHEJ or HDR) without insertion of a donor template, such that the repair results in an indel in the target nucleic acid at or near the site of the double-stranded break.

[0453] In some embodiments, an indel, sometimes referred to as an insertion-deletion or indel mutation, is a type of genetic mutation that results from the insertion and/or deletion of nucleotides in a target nucleic acid. An indel can vary in length (e.g., 1 to 1,000 nucleotides in length) and be detected using methods well known in the art, including sequencing. If the number of nucleotides in the insertion/deletion is not divisible by three, and it occurs in a protein coding region, it is also a frameshift mutation.

[0454] In some embodiments, wherein the compositions, systems, and methods of the present disclosure comprise an additional guide nucleic acid or a use thereof, the dual-guided compositions, systems, and methods described herein can modify the target nucleic acid in two locations. In some cases, dual-guided editing can comprise cleavage of the target nucleic acid in the two locations targeted by the guide RNAs. In certain embodiments, upon removal of the sequence between the guide nucleic acids, the wild-type reading frame is restored. A wild-type reading frame can be a reading frame that produces at least a partially, or fully, functional protein. A non-wild-type reading frame can be a reading frame that produces a non-functional or partially non-functional protein.

[0455] Accordingly, in some embodiments, compositions, systems, and methods described herein can edit 1 to 1,000 nucleotides or any integer in between, in a target nucleic acid. In certain embodiments, 1 to 1,000, 2 to 900, 3 to 800, 4 to 700, 5 to 600, 6 to 500, 7 to 400, 8 to 300, 9 to 200, or 10 to 100 nucleotides, or any integer in between, can be edited by the compositions, systems, and methods described herein. In some embodiments, 1, 2, 3, 4, 5, 6, 7, 8, 9, 10, or more nucleotides can be edited by the compositions, systems, and methods described herein. In some embodiments, 10, 20, 30, 40, 50, 60, 70, 80 90, 100 or more nucleotides, or any integer in between, can be edited by the compositions, systems, and methods described herein. In some embodiments, 100, 200, 300, 400, 500, 600, 700, 800, 900 or more nucleotides, or any integer in between, can be edited by the compositions, systems, and methods described herein.

[0456] In some cases, methods comprise editing a target nucleic acid with two or more effector proteins. Editing a target nucleic acid may comprise introducing a two or more single-stranded breaks in a target nucleic acid. In some embodiments, a break may be introduced by contacting a target nucleic acid with an effector protein and a guide nucleic acid. The guide nucleic acid may bind to the effector protein and hybridize to a region of the target nucleic acid, thereby recruiting the effector protein to the region of the target nucleic acid. Binding of the effector protein to the guide nucleic acid and the region of the target nucleic acid may activate the effector protein, and the effector protein may introduce a break (e.g., a single stranded break) in the region of the target nucleic acid. In some embodiments, modifying a target nucleic acid may comprise introducing a first break in a first region of the target nucleic acid and a second break in a second region of the target nucleic acid. For example, modifying a target nucleic acid may comprise contacting a target nucleic acid with a first guide nucleic acid that binds to a first effector protein and hybridizes to a first region of the target nucleic acid and a second guide nucleic acid that binds to a second programmable nickase and hybridizes to a second region of the target nucleic acid. The first effector protein may introduce a first break in a first strand at the first region of the target nucleic acid, and the second effector protein may introduce a second break in a second strand at the second region of the target nucleic acid. In some embodiments, a segment of the target nucleic acid between the first break and the second break may be removed, thereby modifying the target nucleic acid. In some embodiments, a segment of the target nucleic acid between the first break and the second break may be replaced (e.g., with donor nucleic acid), thereby modifying the target nucleic acid.

[0457] Methods, systems, and compositions described herein can edit or modify a target nucleic acid wherein such editing or modification can be measured by indel activity. Indel activity measures the amount of change in a target nucleic acid (e.g., nucleotide deletion(s) and/or insertion(s)) compared to a target nucleic acid that has not been contacted by a polypeptide described in compositions, systems, and methods described herein. For example, indel activity can be detected by next generation sequencing of one or more target loci of a target nucleic acid where indel percentage is calculated as the fraction of sequencing reads containing insertions or deletions relative to an unedited reference sequence. In certain embodiments, methods, systems, and compositions comprising an effector protein and guide nucleic acid described herein can exhibit about 0.0001% to about 65% or more indel activity upon contact to a target nucleic acid compared to a target nucleic acid non-contacted with compositions, systems, or by methods described herein. For example, methods, systems, and compositions comprising an effector protein and guide nucleic acid described herein can exhibit about 0.0001%, about 0.001%, about 0.01%, about 0.1%, about 1%, about 5%, about 10%, about 15%, about 20%, about 25%, about 30%, about 35%, about 40%, about 45%, about 50%, about 55%, about 60%, about 65% or more indel activity.

[0458] In certain embodiments, sequence deletion is a modification where one or more sequences in a target nucleic acid are deleted relative to a target nucleic acid without the sequence deletion. In certain embodiments, a sequence deletion can result in or effect a splicing disruption or a frameshift mutation. In certain embodiments, a sequence deletion result in or effect a splicing disruption.

[0459] In certain embodiments, a modification is a deletion of an entire exon. In some embodiments, the exon is associated with a disease. In some embodiments, compositions, systems, and methods described herein comprise a combination of a first gRNA, a second gRNA, a first effector protein, and a second effector protein, wherein the combination can be used for deleting the entire exon or a portion thereof. In some embodiments, the first effector protein and the second effector protein are the same. In some embodiments, the first effector protein and the second effector protein are not the same.

[0460] In certain embodiments, sequence skipping is a modification where one or more sequences in a target nucleic acid are skipped upon transcription or translation of the target nucleic acid relative to a target nucleic acid without the sequence skipping. In certain embodiments, sequence skipping can result in or effect a splicing disruption or a frameshift mutation. In certain embodiments, sequence skipping can result in or effect a splicing disruption.

[0461] In certain embodiments, sequence reframing is a modification where one or more bases in a target are modified so that the reading frame of the sequence is reframed relative to a target nucleic acid without the sequence reframing. In certain embodiments, sequence reframing can result in or effect a splicing disruption or a frameshift mutation. In certain embodiments, sequence reframing can result in or effect a frameshift mutation.

[0462] In certain embodiments, sequence knock-in is a modification where one or more sequences is inserted into a target nucleic acid relative to a target nucleic acid without the sequence knock-in. In certain embodiments, sequence knock-in can result in or effect a splicing disruption or a frameshift mutation. In certain embodiments, sequence knock-in can result in or effect a splicing disruption.

[0463] In certain embodiments, editing or modification of a target nucleic acid can be locus specific, wherein compositions, systems, and methods described herein can edit or modify a target nucleic acid at one or more specific loci to effect one or more specific mutations comprising splicing disruption mutations, frameshift mutations, sequence deletion, sequence skipping, sequence reframing, sequence knock-in, or any combination thereof. For example, editing or modification of a specific locus can affect any one of a splicing disruption, frameshift (e.g., 1+ or 2+ frameshift), sequence deletion, sequence skipping, sequence reframing, sequence knock-in, or any combination thereof. In certain embodiments, editing or modification of a target nucleic acid can be locus specific, modification specific, or both. In certain embodiments, editing or modification of a target nucleic acid can be locus specific, modification specific, or both, wherein compositions, systems, and methods described herein comprise an effector protein described herein and a guide nucleic acid described herein.

[0464] Methods of editing a target nucleic acid or modulating the expression of a target nucleic acid may be performed in vivo. Methods of editing a target nucleic acid or modulating the expression of a target nucleic acid may be performed in vitro. Methods of editing a target nucleic acid or modulating the expression of a target nucleic acid may be performed ex vivo. Editing methods include, but are not limited to, introduction of double stranded breaks (DSB), which can result in deleting some nucleotides and disrupting the translation of a functional protein, base editing, and splice acceptor disruption (SA).

[0465] In some embodiments, the method of editing by the effector proteins can be promotor silencing, frameshift mutation, base editing, or splice disruption.

[0466] In some embodiments, the editing by the effector protein targets an exon of the APOC3 gene. In some embodiments, the editing by the effector protein targets an intron of the APOC3 gene. In some embodiments, the editing by the effector protein targets the 3′ UTR of the APOC3 gene. In some embodiments, the editing by the effector protein targets the poly-A tail of the APOC3 gene. In some embodiments, the editing by the effector protein decreases transcription of the DNA sequence of the APOC3 gene. In some embodiments, the editing by the effector protein decreases translation of the RNA sequence of the APOC3 gene. In some embodiments, the effector protein targets exon #4 of the APOC3 gene. In some embodiments, the effector protein targets a splice donor site in exon #1 of the APOC3 gene. In some embodiments, the effector protein targets a splice acceptor site in exon #2 of the APOC3 gene. In some embodiments, the effector protein targets a splice donor site in exon #2 of the APOC3 gene. In some embodiments, the effector protein targets a splice acceptor site in exon #3 of the APOC3 gene. In some embodiments, the effector protein targets a splice donor site in exon #3 of the APOC3 gene. In some embodiments, the effector protein targets a splice acceptor site in exon #4 of the APOC3 gene.

[0467] A “splice donor site” refers to a gene location that is either 20 base pairs upstream or downstream of the 3′ of an exon junction site. A “splice acceptor site” refers to a gene location that is either 20 base pairs upstream or downstream of the 5′ of an exon junction site.

[0468] In some embodiments, the editing by the effector protein targets an exon of the PCSK9 gene. In some embodiments, the editing by the effector protein targets an intron of the PCSK9 gene. In some embodiments, the editing by the effector protein targets the 3′ UTR of the PCSK9 gene. In some embodiments, the editing by the effector protein targets the poly-A tail of the PCSK9 gene. In some embodiments, the editing by the effector protein decreases transcription of the DNA sequence of the PCSK9 gene. In some embodiments, the editing by the effector protein decreases translation of the RNA sequence of the PCSK9 gene. In some embodiments, the effector protein targets exon #1 of the PCSK9 gene. In some embodiments, the effector protein targets exon #2 of the PCSK9 gene. In some embodiments, the effector protein targets exon #3 of the PCSK9 gene. In some embodiments, the effector protein targets exon #4 of the PCSK9 gene. In some embodiments, the effector protein targets exon #5 of the PCSK9 gene. In some embodiments, the effector protein targets exon #6 of the PCSK9 gene. In some embodiments, the effector protein targets exon #7 of the PCSK9 gene. In some embodiments, the effector protein targets exon #8 of the PCSK9 gene. In some embodiments, the effector protein targets exon #9 of the PCSK9 gene. In some embodiments, the effector protein targets exon #10 of the PCSK9 gene. In some embodiments, the effector protein targets exon 1 of the PCSK9 gene. In some embodiments, the effector protein targets exon #11 of the PCSK9 gene. In some embodiments, the effector protein targets exon #12 of the PCSK9 gene.

[0469] In some embodiments, the gene regulation is regulated by effector protein repressing a promoter. In some embodiments, the repression is temporary or transient. In some embodiments, the repression is permanent. In some embodiments, the effector protein is linked to a KRAB sequence. In some embodiments, the effector protein is linked to an acetylase sequence. In some embodiments, the effector protein is linked to a methyltransferase. In some embodiments, the effector protein is linked to a Ezh2 sequence.

[0470] In some embodiments, the effector protein causes a frameshift mutation. In some embodiments, the effector protein causes the addition of one or more nucleotides causing a shift in the reading frame. In some embodiments, the effector protein causes a deletion of one or more nucleotides causing a shift in the reading frame. In some embodiments, the effector protein causes the deletion or addition of 1, 2, or 4 nucleotides. In some embodiments, the effector protein causes an alternation in the amino acid sequence at protein translation. In some embodiments, the alteration is a missense mutation. In some embodiments, the alteration is a premature stop codon. In some embodiments, the effector protein causes a change in the ribosome reading frame and cause premature termination of translation at a new nonsense or chain termination codon (TAA, TAG, and TGA).

[0471] In some embodiments, the effector protein causes a nucleobase to be edited. In some embodiments, the effector protein is linked to an adenine base editing enzyme (e.g., an ABE). In some embodiments, the effector protein is linked to a cytosine base editing enzyme (e.g., a CBE). In some embodiments, the fusion protein causes a cytodine to thymidine transition. In some embodiments, the fusion protein causes a cytodine to uracil transition. In some embodiments, the fusion protein causes a thymidine to cytodine transition. In some embodiments, the fusion protein causes an adenosine to guanosine transition. In some embodiments, the fusion protein causes a guanosine to adenosine conversion. In some embodiments, the alteration results in a missense mutation. In some embodiments, the alteration is a premature stop codon. In some embodiments, the fusion protein causes a premature termination of translation at a new nonsense or chain termination codon (TAA, TAG, and TGA).

### 11. Methods of Treating a Disorder

[0472] Described herein are methods for treating and/or preventing a disease in a subject in need thereof comprising administering the systems and compositions described herein. In some embodiments, treating and/or preventing a disease comprises modifying a target nucleic acid in a gene (e.g., APOC3, PCSK9, or ANGPTL3 gene) and/or modifying expression of the gene related to the disease. In some embodiments, the gene related to the disease is APOC3 and the disease is associated with an increase in APOC3 protein expression. In some embodiments, the gene related to the disease is PCSK9 and the disease is associated with an increase in PCSK9 protein expression. In some embodiments, the gene related to the disease is ANGPTL3 and the disease is associated with an increase in ANGPLT3 protein expression.

[0473] Described herein are methods for treating or preventing a disease in a subject by modifying a target nucleic acid in a gene (e.g., APOC3, PCSK9, or ANGPTL3) or expression of a gene related to the disease. In some embodiments, the present disclosure provides methods of treating or preventing a disease or disorder in a subject in need thereof comprising administration of the systems and/or compositions described herein. In some embodiments, the disease or disorder comprises an increase in APOC3 expression. In some embodiments, the disease or disorder comprises an increase in PCSK9 expression. In some embodiments, the disease or disorder comprises an increase in ANGPTL3 expression.

[0474] In some embodiments, the disease or disorder is a cardiovascular disease. In some embodiments, the present disclosure provides methods of treating or preventing a cardiovascular disease in a subject in need thereof comprising administration of the systems and/or compositions described herein. “Cardiovascular diseases” is an umbrella term that encompasses a broad spectrum of cardiologic diagnoses, affecting heart and circulatory system. Disorders under this term primarily comprise coronary heart diseases, cerebrovascular accidents, and peripheral vascular diseases. The major underlying cause of CVD appears to be atherosclerosis, defined as an immunoinflammatory fibroproliferative disease, in which fatty deposits called atheromatous plaque develops, over many decades, inside the inner layers of the arterial wall, and over time, it narrows the artery depriving the vascularized tissue of oxygen. In some embodiments, the cardiovascular disease is atherosclerotic cardiovascular disease. In some embodiments, the cardiovascular disease is coronary artery disease (CAD). In some embodiments, the disease is chronic kidney disease (CKD). In some embodiments, the disease is Familial chylomicronemia syndrome (FCS). In some embodiments, the disease is lipodystrophy. In some embodiments, the disease is hypertriglyceridemia. In some embodiments, the hypertriglyceridemia is severe hypertriglyceridemia.

[0475] In some embodiments, the methods provided herein comprise lowering triglyceride levels in a mammal with hypertriglyceridemia comprising administration of a composition or system described herein. Hypertriglyceridemia (HTG) is a clinical diagnosis defined when plasma triglyceride (TG) concentrations rise above a threshold value, such as the 90th or 95th percentile for age and sex. In some embodiments, the method comprises delivering a composition to the mammal, wherein the composition comprises: a guide nucleic acid comprising a nucleotide sequence that is at least 70%, at least 75%, at least 80%, at least 85%, at least 90%, at least 95%, or 100% identical to a nucleotide sequence selected from any one of SEQ ID NOs: 1-31, 38-43, 67-202, 207-772, 779-820, and 820-2089 and an effector protein or nucleic acid encoding the same, wherein the effector protein comprises an amino acid sequence that is at least 70%, at least 75%, at least 80%, at least 85%, at least 90%, at least 95%, or 100% identical to a nucleotide sequence selected from any one of SEQ ID NOs: 32 and 773.

[0476] In some embodiments, the method for treating a disease comprises modifying the APOC3 gene or modifying expression of the APOC3 gene such that the disease (e.g., a cardiovascular disease) is treated. In some embodiments, the gene encodes an APOC3 protein. In some embodiments, the disease is any one of the diseases or disorders listed above and the gene is the gene set forth in TABLE 24.

[0477] In some embodiments, the method for treating a disease comprises modifying the PCSK9 gene or modifying expression of the PCSK9 gene such that the disease (e.g., a cardiovascular disease) is treated. In some embodiments, the gene encodes a PCSK9 protein. In some embodiments, the disease is any one of the diseases or disorders listed above and the gene is the gene set forth in TABLE 26.

[0478] In some embodiments, the method for treating a disease comprises modifying the ANGPTL3 gene or modifying expression of the ANGPTL3 gene such that the disease (e.g., a cardiovascular disease) is treated. In some embodiments, the gene encodes a ANGPTL3 protein. In some embodiments, the disease is any one of the diseases or disorders listed above and the gene is the gene set forth in TABLE 28.

[0479] In some embodiments, methods comprise administering a guide RNA comprising one or more sequences selected from the sequences in TABLES 1-13, or a nucleic acid encoding the same. In some embodiments, methods comprise administering a Cas protein or a nucleic acid encoding the same. In some embodiments, the Cas protein comprises an amino acid sequence that is at least 90% or 95% identical to any one of the sequences in TABLES 15-19. The Cas protein or nucleic acid encoding the same, and the guide RNA or nucleic acid encoding the same may be administered in a single composition. The Cas protein or nucleic acid encoding the same, and the guide RNA or nucleic acid encoding the same may be administered separately (formulaically or chronologically). In some embodiments, methods comprise administering: a Cas protein or a messenger RNA encoding a Cas protein and a lipid nanoparticle; and a viral vector encoding a guide RNA. In some embodiments, methods comprise administering a viral vector encoding the Cas protein and the guide RNA. In some embodiments, methods comprise administering a Cas protein and a lipid nanoparticle. In some embodiments, methods comprise administering a messenger RNA encoding a Cas protein.

[0480] In some embodiments, methods comprise administering premedication prior to administering the guide RNA. In some embodiments, the premedication includes a corticosteroid. In some embodiments, the premedication includes a histamine antagonist or inverse agonist. In some embodiments, the premedication includes dexamethasone. In some embodiments, the premedication includes famotidine. In some embodiments, the premedication includes diphenhydramine.

### Further Numbered Embodiments

[0481] The present invention is also described, for example and without limitation, in the following numbered embodiments which are not to be construed as limiting the scope thereof in any manner.

[0482] Embodiment 1: A guide ribonucleic acid (RNA) or a polynucleotide encoding the same, wherein the guide RNA comprises:
[0483] a. a first region comprising a protein binding sequence, and
[0484] b. a second region comprising a targeting sequence that is complementary to a target sequence that is within an APOC3 gene, wherein the protein binding sequence is capable of being bound by a clustered regularly interspaced short palindromic repeats (CRISPR) Cas protein other than a Cas9 protein.

[0485] Embodiment 2: The guide RNA of embodiment 1, wherein the protein binding sequence comprises a repeat sequence.

[0486] Embodiment 3: The guide RNA of any one of embodiments 1-2, wherein the targeting sequence comprises a spacer sequence.

[0487] Embodiment 4: The guide RNA of any one of embodiments 1-3, wherein the target sequence comprises at least a portion of an APOC3 exon 1, an APOC3 exon 2, an APOC3 exon 3, an APOC3 exon 4, an APOC3 exon 1 splice donor site, an APOC3 exon 2 splice acceptor site, an APOC3 exon 2 splice donor site, an APOC3 exon 3 splice acceptor site, an APOC3 exon 3 splice acceptor site, an APOC3 exon 4 splice acceptor site, or a combination thereof.

[0488] Embodiment 5: The guide RNA of embodiments 1-4, wherein the target sequence is within the exon 4 region of the APOC3 gene.

[0489] Embodiment 6: The guide RNA of embodiments 5, wherein the targeting sequence is at least 80%, at least 85%, at least 90%, at least 95% of 100% identical to a sequence selected from SEQ ID NOs: 1-15.

[0490] Embodiment 7: The guide RNA of embodiments 1-4, wherein the target sequence comprises a splice donor site of exon 1 of the APOC3 gene.

[0491] Embodiment 8: The guide RNA of embodiment 7, wherein the targeting sequence is at least 80%, at least 85%, at least 90%, at least 95% of 100% identical to a sequence selected from SEQ ID NOs: 67-68.

[0492] Embodiment 9: The guide RNA of embodiments 1-4, wherein the target sequence comprises a splice acceptor site of exon 2 of the APOC3 gene.

[0493] Embodiment 10: The guide RNA of embodiment 9, wherein the targeting sequence is at least 80%, at least 85%, at least 90%, at least 95% of 100% identical to SEQ ID NO: 69.

[0494] Embodiment 11: The guide RNA of embodiments 1-4, wherein the target sequence comprises a splice acceptor site of exon 3 of the APOC3 gene.

[0495] Embodiment 12: The guide RNA of embodiment 11, wherein the targeting sequence is at least 80%, at least 85%, at least 90%, at least 95% of 100% identical to a sequence selected from SEQ ID NOs: 70-71.

[0496] Embodiment 13: The guide RNA of embodiments 1-4, wherein the target sequence comprises a splice acceptor site of exon 4 of the APOC3 gene.

[0497] Embodiment 14: The guide RNA of embodiment 13, wherein the targeting sequence is at least 80%, at least 85%, at least 90%, at least 95% of 100% identical to SEQ ID NO: 72.

[0498] Embodiment 15: The guide RNA of embodiments 1-4, wherein the target sequence comprises a splice donor site of exon 2 of the APOC3 gene.

[0499] Embodiment 16: The guide RNA of embodiment 13, wherein the targeting sequence is at least 80%, at least 85%, at least 90%, at least 95% of 100% identical to SEQ ID NO: 207.

[0500] Embodiment 17: The guide RNA of any one of embodiments 1-16, wherein the protein binding sequence is at least 80%, at least 85%, at least 90%, at least 95% or 100% identical to a sequence selected from any one of SEQ ID NOs: 16 or 38-43.

[0501] Embodiment 18: The guide RNA of embodiment 17, wherein the guide RNA is selected from the group consisting of SEQ ID NOs: 21, 23, 26, 27, and 31.

[0502] Embodiment 19: The guide RNA of any one of embodiments 1-18, wherein the Cas protein is at least 80%, at least 85%, at least 90%, at least 95%, or 100% identical to a sequence selected from Tables 15, 18, and 19.

[0503] Embodiment 20: The guide RNA of embodiments 1-4, wherein the target sequence is within the exon 1 region of the APOC3 gene.

[0504] Embodiment 21: The guide RNA of embodiment 20, wherein the targeting sequence is at least 80%, at least 85%, at least 90%, at least 95% of 100% identical to a sequence selected from SEQ ID NOs: 209-211.

[0505] Embodiment 22: The guide RNA of embodiments 1-4, wherein the target sequence within the exon 2 region of the APOC3 gene.

[0506] Embodiment 23: The guide RNA of embodiment 22, wherein the targeting sequence is at least 80%, at least 85%, at least 90%, at least 95% of 100% identical to SEQ ID NO: 212.

[0507] Embodiment 24: The guide RNA of embodiments 1-4, wherein the target sequence within the exon 3 region of the APOC3 gene.

[0508] Embodiment 25: The guide RNA of embodiment 24, wherein the targeting sequence is at least 80%, at least 85%, at least 90%, at least 95% of 100% identical to a sequence selected from SEQ ID NOs: 213-217.

[0509] Embodiment 26: The guide RNA of embodiments 1-4, wherein the target sequence within the exon 4 region of the APOC3 gene.

[0510] Embodiment 27: The guide RNA of embodiment 26, wherein the targeting sequence is at least 80%, at least 85%, at least 90%, at least 95% of 100% identical to a sequence selected from SEQ ID NOs: 270-280.

[0511] Embodiment 28: The guide RNA of embodiments 1-4, wherein the target sequence comprises a splice acceptor site of exon 3 of the APOC3 gene.

[0512] Embodiment 29: The guide RNA of embodiment 28, wherein the targeting sequence is at least 80%, at least 85%, at least 90%, at least 95% of 100% identical to a sequence selected from SEQ ID NOs: 281-290.

[0513] Embodiment 30: The guide RNA of embodiments 1-4, wherein the target sequence comprises a splice donor site of exon 3 of the APOC3 gene.

[0514] Embodiment 31: The guide RNA of embodiment 30, wherein the targeting sequence is at least 80%, at least 85%, at least 90%, at least 95% of 100% identical to a sequence selected from SEQ ID NOs: 292-296.

[0515] Embodiment 32: The guide RNA of embodiments 1-4, wherein the target sequence comprises a splice acceptor site of exon 3 of the APOC3 gene.

[0516] Embodiment 33: The guide RNA of embodiment 32, wherein the targeting sequence is at least 80%, at least 85%, at least 90%, at least 95% of 100% identical to SEQ ID NO: 297.

[0517] Embodiment 34: The guide RNA of any one of embodiments 1-4, wherein the targeting sequence is at least 80%, at least 85%, at least 90%, at least 95% of 100% identical to SEQ ID NO: 207, 298-299, 804-805, 823-825, 830-1399, 2018-2026, or 2084-2086.

[0518] Embodiment 35: The guide RNA of any one of embodiments 1-4 and 20-34, wherein the protein binding sequence is at least 80%, at least 85%, at least 90%, at least 95% or 100% identical to a sequence selected from Table 7.

[0519] Embodiment 36: The guide RNA of any one of embodiments 1-4 and 20-35, wherein the Cas protein is at least 80%, at least 85%, at least 90%, at least 95%, or 100% identical to a sequence selected from Tables 15-19.

[0520] Embodiment 37: A system comprising the guide RNA of any one of embodiments 1-36, or the polynucleotide encoding the same.

[0521] Embodiment 38: The system of embodiment 37, further comprising a Cas protein or a polynucleotide encoding the same.

[0522] Embodiment 39: The system of embodiment 38 wherein the polynucleotide is an mRNA polynucleotide.

[0523] Embodiment 40: The system of any of embodiments 37-39, wherein the polynucleotide is a DNA expression vector.

[0524] Embodiment 41: The system of embodiment 40, wherein the DNA expression vector is an adeno-associated viral (AAV) vector.

[0525] Embodiment 42: The system of embodiment 41, comprising a recombinant adeno-associated virus (AAV) expression cassette comprising sequences encoding
[0526] a. a first inverted terminal repeat (ITR) and a first promoter;
[0527] b. the Cas protein;
[0528] c. optionally a second promoter;
[0529] d. a second polynucleotide encoding the guide RNA of any one of embodiments 1-36; and
[0530] e. a second ITR,
[0531] wherein the AAV expression cassette is a self-complementary AAV vector.

[0532] Embodiment 43: The system of any one of embodiments 37-42, comprising a lipid or lipid nanoparticle.

[0533] Embodiment 44: The system of any one of embodiments 37-43, wherein the Cas protein recognizes a protospacer motif (PAM) of 5′-TTN-3′.

[0534] Embodiment 45: The system of embodiment 44, wherein the Cas protein recognizes the PAM sequence selected from the group consisting of 5′-TTG-3′, 5′-TTC-3′, 5′-TTT-3′, and 5′-TTA-3′.

[0535] Embodiment 46: The system of any one of embodiments 37-45, wherein the Cas protein comprises a sequence that is at least 80%, at least 85%, at least 90%, at least 95%, at least 97%, at least 98%, at least 99%, or 100% identical to SEQ ID NO: 32.

[0536] Embodiment 47: The system of embodiment 46, wherein the Cas protein has a positively charged amino acid at position 26 of SEQ ID NO: 32 and/or a threonine at position 471 of SEQ ID NO: 32.

[0537] Embodiment 48: The system of embodiment 47, wherein the positively charged amino acid is selected from arginine, histidine, and lysine.

[0538] Embodiment 49: The system of embodiment 48, wherein the positively charged amino acid is arginine.

[0539] Embodiment 50: The system of any one of embodiments 37-43, wherein the Cas protein recognizes a protospacer motif (PAM) of 5′-TNTR-3′.

[0540] Embodiment 51: The system of embodiment 50, wherein the Cas protein recognizes the PAM sequence selected from the group consisting of 5′-TTTG-3′, 5′-TCTG-3′, 5′-TGTG-3′, 5′-TCTA-3′, 5′-TATA-3′, 5′-TTTA-3′, 5′-TGTA-3′, and 5′-TATG-3′.

[0541] Embodiment 52:The system of any one of embodiments 37-43 and 50-51, wherein the Cas protein comprises a sequence that is at least 80%, at least 85%, at least 90%, at least 95%, at least 97%, at least 98%, at least 99%, or 100% identical to SEQ ID NO: 773.

[0542] Embodiment 53: The system of embodiment 52, wherein the Cas protein has a positively charged amino acid at position 220 of SEQ ID NO: 773.

[0543] Embodiment 54: The system of embodiment 53, wherein the positively charged amino acid is selected from arginine, histidine, and lysine.

[0544] Embodiment 55: The system of embodiment 54, wherein the positively charged amino acid is arginine.

[0545] Embodiment 56: The system of any one of embodiments 37-55, wherein the Cas protein amino acid sequence comprises a nuclear localization signal.

[0546] Embodiment 57: The system of any one of embodiments 37-56, wherein the Cas protein amino acid sequence is at least 80%, at least 85%, at least 90%, at least 95%, at least 97%, at least 98%, at least 99%, or 100% identical to a sequence from Tables 15-19.

[0547] Embodiment 58: The system of any one of embodiments 37-57, wherein the system further comprises an additional guide RNA that binds a different portion of the target nucleic acid than the guide RNA.

[0548] Embodiment 59: The system of any one of embodiments 37-58, wherein the Cas protein reduces expression of the APOC3 gene.

[0549] Embodiment 60: The system of any one of embodiments 37-59, wherein the Cas protein is linked to a heterologous protein.

[0550] Embodiment 61: The system of embodiment 60, wherein the heterologous protein is linked to the N-terminus or C-terminus of the Cas protein.

[0551] Embodiment 62: The system of any of embodiments 58-61, wherein the Cas protein is linked to a KRAB domain, acetylase domain, or a base editing enzyme.

[0552] Embodiment 63: The system of embodiment 62, wherein the base editing enzyme is a cytosine base editing enzyme (CBE), adenine base editing enzyme (ABE), or a C-to-G base editing enzyme (CGBE).

[0553] Embodiment 64: The system of embodiment 59, wherein the expression of the APOC3 gene is reduced by promoter inhibition, a frameshift mutation, base editing, and/or 3′ UTR disruption.

[0554] Embodiment 65: The system of any of embodiments 59 or 64, wherein the reduced expression of the APOC3 gene is transient or permanent.

[0555] Embodiment 66: A pharmaceutical composition comprising the guide RNA of any one of embodiments 1-36 or the system of any one of embodiments 37-65, and a pharmaceutical acceptable carrier.

[0556] Embodiment 67: A cell, or population of cells, comprising or modified by the guide RNA of any one of embodiments 1-36 or the system of any one of embodiments 37-65.

[0557] Embodiment 68: A method of modifying an APOC3 gene, comprising contacting the APOC3 gene with the guide RNA of any one of embodiments 1-36 or system of any one of embodiments 37-65.

[0558] Embodiment 69: The method of embodiment 68, wherein modifying of the APOC3 gene comprises inserting, deleting, or substituting one or more nucleotides in the APOC3 gene.

[0559] Embodiment 70: The method of embodiment 69, wherein the modifying of the APOC3 gene reduces the expression of the APOC3 gene.

[0560] Embodiment 71: The method of embodiment 70, wherein the reduced expression of the APOC3 gene is transient.

[0561] Embodiment 72: The method of embodiments 70, wherein the reduced expression of the APOC3 gene is permanent.

[0562] Embodiment 73: A nucleic acid expression vector that encodes a guide RNA, wherein the guide RNA comprises at least one sequence that is at least 80%, at least 85%, at least 90%, at least 95% or 100% identical to a sequence selected from any one of TABLES 1, 2, 7, 8, or 11.

[0563] Embodiment 74: The nucleic acid expression vector of embodiment 73, wherein the nucleic acid expression vector is an adenoviral associated viral (AAV) vector.

[0564] Embodiment 75: The nucleic acid expression vector of embodiments 73 or 74, wherein the nucleic acid expression vector further comprises a polynucleotide encoding an effector protein that is at least 80%, at least 85%, at least 90%, at least 95%, at least 99%, or 100% identical to any one of the sequences recited in TABLES 15-19.

[0565] Embodiment 76: A pharmaceutical composition, comprising the nucleic acid expression vector of any one of embodiments 73-75, and a pharmaceutically acceptable excipient.

[0566] Embodiment 77: A system comprising the nucleic acid expression vector of any one of embodiments 73-75.

[0567] Embodiment 78: The system of embodiment 77, comprising at least one detection reagent for detecting a target nucleic acid.

[0568] Embodiment 79: A method of modifying an APOC3 gene, the method comprising contacting the APOC3 gene genome with the nucleic acid expression vector of any one of embodiments 73-75, the pharmaceutical composition of embodiment 76, or the system of any one of embodiments 77-78, thereby modifying the APOC3 gene.

[0569] Embodiment 80: The method of embodiment 79, wherein the modifying of the APOC3 gene comprises cleaving the APOC3 gene, deleting a nucleotide of the APOC3 gene, inserting a nucleotide into the APOC3 gene, substituting a nucleotide of the APOC3 gene with an alternative nucleotide, or editing a nucleotide, more than one of the foregoing, or any combination thereof.

[0570] Embodiment 81: The method of embodiments 79 or 80, wherein the composition further comprises an additional guide RNA that binds a different portion of the APOC3 gene than the guide RNA.

[0571] Embodiment 82: The method of embodiment 81, wherein the composition removes the sequence between the guide RNA and the additional guide RNA.

[0572] Embodiment 83: The method of any one of embodiments 79-82, further comprising contacting the APOC3 gene with a donor nucleic acid.

[0573] Embodiment 84: The method of any one of embodiments 79-83, wherein the method is performed in a cell.

[0574] Embodiment 85: The method of embodiment 84, wherein the method is performed in vivo.

[0575] Embodiment 86: A cell comprising the nucleic acid expression vector of any one of embodiments 73-75.

[0576] Embodiment 87: A cell that comprises a target nucleic acid modified by the nucleic acid expression vector of any one of embodiments 73-75.

[0577] Embodiment 88: The cell of embodiments 86 or 87, wherein the cell is a eukaryotic cell.

[0578] Embodiment 89: The cell of any one of embodiments 86-88, wherein the cell is a mammalian cell.

[0579] Embodiment 90: The cell of any one of embodiments 86-89, wherein the cell is a human cell.

[0580] Embodiment 91: A population of cells that comprises at least one cell of any one of embodiments 86-90.

[0581] Embodiment 92: A method of treating a disease caused by a misexpression of the APOC3 gene, the method comprising contacting a cell that has the misexpression of the APOC3 gene, comprising contacting the APOC3 gene with the guide RNA of any of embodiments 1-36 or system of any one of embodiments 37-65.

[0582] Embodiment 93: The method of embodiment 92, comprising modifying the APOC3 gene.

[0583] Embodiment 94: The method of embodiment 93, wherein modifying the APOC3 gene comprises inserting, deleting, or substituting one or more nucleotides in the APOC3 gene.

[0584] Embodiment 95: The method of any one of embodiments 92-94, wherein the disease is a cardiovascular disease.

[0585] Embodiment 96: The method of embodiment 95, wherein the cardiovascular disease is atherosclerotic cardiovascular disease or is coronary artery disease (CAD).

[0586] Embodiment 97: The method of any one of embodiments 92-94, wherein the disease is chronic kidney disease (CKD).

[0587] Embodiment 98: The method of any one of embodiments 92-94, wherein the disease is familial chylomicronemia syndrome (FCS).

[0588] Embodiment 99: The method of any one of embodiments 92-94, wherein the disease is lipodystrophy.

[0589] Embodiment 100: The method of any one of embodiments 92-94, wherein the disease is hypertriglyceridemia.

[0590] Embodiment 101: The method of any one of embodiment 100, wherein the disease is severe hypertriglyceridemia.

[0591] Embodiment 102: A system comprising a recombinant adeno-associated virus (AAV) expression cassette comprising sequences encoding
[0592] a. a first inverted terminal repeat (ITR) and a first promoter;
[0593] b. a Cas protein comprising a sequence that is at least 95% identical to any of SEQ ID NOs: 32-35, 45-46, or 54-66;
[0594] c. optionally a second promoter;
[0595] d. a second polynucleotide encoding SEQ ID NO:26; and
[0596] e. a second ITR,
[0597] wherein the AAV expression cassette is a self-complementary AAV vector.

[0598] Embodiment 103: A composition for introducing indels in an APOC3 gene in eukaryotic cells or organisms comprising SEQ ID NO: 26 or a nucleic acid encoding the same, and a Cas protein comprising any of SEQ ID NOs: 32-35, 45-46, or 54-66 or nucleic acid encoding the same.

[0599] Embodiment 104: A guide ribonucleic acid (RNA) or a polynucleotide encoding the same, wherein the guide RNA comprises:
[0600] a. a first region comprising a protein binding sequence, and
[0601] b. a second region comprising a targeting sequence that is complementary to a target sequence that is within a PCSK9 gene,
[0602] wherein the protein binding sequence is capable of being bound by a clustered regularly interspaced short palindromic repeats (CRISPR) Cas protein other than a Cas9 protein.

[0603] Embodiment 105: The guide RNA of embodiment 104, wherein the protein binding sequence comprises a repeat sequence.

[0604] Embodiment 106: The guide RNA of any one of embodiments 104-105, wherein the targeting sequence comprises a spacer sequence.

[0605] Embodiment 107: The guide RNA of any one of embodiments 105-106, wherein the target sequence comprises at least a portion of a PCSK9 exon 1, PCSK9 exon 2, PCSK9 exon 3, PCSK9 exon 4, PCSK9 exon 5, PCSK9 exon 6, PCSK9 exon 7, PCSK9 exon 8, PCSK9 exon 9, PCSK9 exon 10, PCSK9 exon 11, PCSK9 exon 12, or a combination thereof.

[0606] Embodiment 108: The guide RNA of embodiment 107, wherein the targeting sequence is at least 80%, at least 85%, at least 90%, at least 95% of 100% identical to a sequence selected from SEQ ID NOs: 79-140, 208, 300-487, 799-803, 809, 822, and 1970-1995.

[0607] Embodiment 109: The guide RNA of any one of embodiments 104-108, wherein the protein binding sequence is at least 80%, at least 85%, at least 90%, at least 95% or 100% identical to a sequence selected from Table 7.

[0608] Embodiment 110: The guide RNA of any one of embodiments 104-109, wherein the Cas protein is at least 80%, at least 85%, at least 90%, at least 95%, or 100% identical to a sequence selected from TABLES 15-19.

[0609] Embodiment 111: A guide ribonucleic acid (RNA) or a polynucleotide encoding the same, wherein the guide RNA comprises:
[0610] a. a first region comprising a protein binding sequence, and
[0611] b. a second region comprising a targeting sequence that is complementary to a target sequence that is within a ANGPLT3 gene,
   wherein the protein binding sequence is capable of being bound by a clustered regularly interspaced short palindromic repeats (CRISPR) Cas protein other than a Cas9 protein.

[0612] Embodiment 112: The guide RNA of embodiment 111, wherein the protein binding sequence comprises a repeat sequence.

[0613] Embodiment 113: The guide RNA of any one of embodiments 111-112, wherein the targeting sequence comprises a spacer sequence.

[0614] Embodiment 114: The guide RNA of embodiment 113, wherein the targeting sequence is at least 80%, at least 85%, at least 90%, at least 95% of 100% identical to a sequence selected from SEQ ID NOs: 806-808 or 1996-2017.

[0615] Embodiment 115: The guide RNA of any one of embodiments 111-114, wherein the protein binding sequence is at least 80%, at least 85%, at least 90%, at least 95% or 100% identical to a sequence selected from Table 7.

[0616] Embodiment 116: The guide RNA of any one of embodiments 111-115, wherein the Cas protein is at least 80%, at least 85%, at least 90%, at least 95%, or 100% identical to a sequence selected from TABLES 15-19.

[0617] Embodiment 117: A method of treating a disease caused by a misexpression of the PCSK9 gene or the ANGPTL3 gene, the method comprising contacting a cell that has the misexpression of the PCSK9 gene or the ANGPTL3 gene, comprising contacting the PCSK9 gene or ANGPTL3 gene with the guide RNA of any of embodiments 104-116.

[0618] Embodiment 118: The method of embodiment 117, comprising modifying the PCSK9 gene or the ANGPTL3 gene.

[0619] Embodiment 119: The method of embodiment 118, wherein modifying the PCSK9 gene or the ANGPTL3 gene comprises inserting, deleting, or substituting one or more nucleotides in the PCSK9 gene or the ANGPTL3 gene.

[0620] Embodiment 120: The method of any one of embodiments 117-119, wherein the disease is a cardiovascular disease.

[0621] Embodiment 121: The method of embodiment 120, wherein the cardiovascular disease is atherosclerotic cardiovascular disease or is coronary artery disease (CAD).

[0622] Embodiment 122: A fusion protein comprising an effector protein and a base editing enzyme, wherein
[0623] a. the effector protein comprises an amino acid sequence that is at least 65%, at least 70%, at least 75%, at least 80%, at least 85%, at least 90%, at least 95%, at least 97%, at least 98%, at least 99%, or 100% identical to SEQ ID NO: 32; and
[0624] b. the base editing enzyme comprises an amino acid sequence that is at least 65%, at least 70%, at least 75%, at least 80%, at least 85%, at least 90%, at least 95%, at least 97%, at least 98%, at least 99%, or 100% identical to SEQ ID NO: 796.

[0625] Embodiment 123: The fusion protein of embodiment 122, wherein the effector protein comprises the amino acid substitutions of L26K and E567Q relative to SEQ ID NO: 32.

[0626] Embodiment 124: The fusion protein of any one of embodiments 122 or 123, wherein the fusion protein comprises an amino acid sequence that is at least 90% or at least 95% identical to SEQ ID NO: 798.

[0627] Embodiment 125: The fusion protein of embodiments 122 or 123, wherein the fusion protein comprises or consists of SEQ ID NO: 798.

[0628] Embodiment 126: A system comprising
[0629] a. a guide nucleic acid or a DNA molecule encoding the guide nucleic acid, wherein the guide nucleic acid comprises:
   [0630] i. a first region comprising a protein binding sequence; and
   [0631] ii. a second region comprising a targeting sequence that is complementary to a target sequence of an APOC3 gene and comprising a spacer sequence selected from SEQ ID NOs: 804-805,
   [0632] wherein the first region is located 5′ of the second region;
[0633] b. a fusion protein comprising an effector protein and a base editing enzyme, or a nucleic acid encoding the fusion protein.

[0634] Embodiment 127: A system comprising
[0635] a. a guide nucleic acid or a DNA molecule encoding the guide nucleic acid, wherein the guide nucleic acid comprises a nucleotide sequence that is at least 70%, at least 75%, at least 80%, at least 85%, at least 90%, at least 95%, or 100% identical to a sequence selected from SEQ ID NOs: 815-816; and
[0636] b. a fusion protein comprising an effector protein and a base editing enzyme, or a nucleic acid encoding the fusion protein, wherein the fusion protein comprises an amino acid sequence that is at least 90% or at least 95% identical to SEQ ID NO: 798.

[0637] Embodiment 128: A system comprising
[0638] a. a guide nucleic acid or a DNA molecule encoding the guide nucleic acid, wherein the guide nucleic acid comprises:
   [0639] i. a first region comprising a protein binding sequence; and
   [0640] ii. a second region comprising a targeting sequence that is complementary to a target sequence of an PCSK9 gene and is selected from SEQ ID NOs: 799-803 and 809,
   [0641] wherein the first region is located 5′ of the second region;
[0642] b. a fusion protein comprising an effector protein and a base editing enzyme, or a nucleic acid encoding the fusion protein.

[0643] Embodiment 129: A system comprising
[0644] a. a guide nucleic acid or a DNA molecule encoding the guide nucleic acid, wherein the guide nucleic acid comprises a nucleotide sequence that is at least 70%, at least 75%, at least 80%, at least 85%, at least 90%, at least 95%, or 100% identical to a sequence selected from SEQ ID NOs: 810-814 and 820; and
[0645] b. a fusion protein comprising an effector protein and a base editing enzyme, or a nucleic acid encoding the fusion protein, wherein the fusion protein comprises an amino acid sequence acid sequence that is at least 90% or at least 95% identical to SEQ ID NO: 798.

[0646] Embodiment 130: A system comprising
[0647] a. a guide nucleic acid or a DNA molecule encoding the guide nucleic acid, wherein the guide nucleic acid comprises:
   [0648] i. a first region comprising a protein binding sequence; and
   [0649] ii. a second region comprising a targeting sequence that is complementary to a target sequence of an ANGPTL gene and comprising a spacer sequence selected from SEQ ID NOs: 806-808,
   [0650] wherein the first region is located 5′ of the second region;
[0651] b. a fusion protein comprising an effector protein and a base editing enzyme, or a nucleic acid encoding the fusion protein.

[0652] Embodiment 131:A system comprising
[0653] a. a guide nucleic acid or a DNA molecule encoding the guide nucleic acid, wherein the guide nucleic acid comprises a nucleotide sequence that is at least 70%, at least 75%, at least 80%, at least 85%, at least 90%, at least 95%, or 100% identical to a sequence selected from SEQ ID NOs: 817-819; and
[0654] b. a fusion protein comprising an effector protein and a base editing enzyme, or a nucleic acid encoding the fusion protein, wherein the fusion protein comprises an amino acid sequence acid sequence that is at least 90% or at least 95% identical to SEQ ID NO: 798.

[0655] Embodiment 132: A fusion protein comprising an effector protein and a base editing enzyme, wherein
[0656] a. the effector protein comprises an amino acid sequence that is at least 65%, at least 70%, at least 75%, at least 80%, at least 85%, at least 90%, at least 95%, at least 97%, at least 98%, at least 99%, or 100% identical to SEQ ID NO: 773; and
[0657] b. the base editing enzyme comprises an amino acid sequence that is at least 65%, at least 70%, at least 75%, at least 80%, at least 85%, at least 90%, at least 95%, at least 97%, at least 98%, at least 99%, or 100% identical to SEQ ID NO: 796.

[0658] Embodiment 133: The fusion protein of embodiment 132, wherein the effector protein comprises the amino acid substitutions of D220R and E335Q relative to SEQ ID NO: 773.

[0659] Embodiment 134: The fusion protein of any one of embodiments 132 or 133, wherein the fusion protein comprises an amino acid sequence that is at least 90% or at least 95% identical to SEQ ID NO: 797.

[0660] Embodiment 135: The fusion protein of any one of embodiments 132 or 133, wherein the fusion protein comprises or consists of SEQ ID NO: 797.

[0661] Embodiment 136: A system comprising
[0662] a. a guide nucleic acid or a DNA molecule encoding the guide nucleic acid, wherein the guide nucleic acid comprises:
   [0663] i. a first region comprising a protein binding sequence; and
   [0664] ii. a second region comprising a targeting sequence that is complementary to a target sequence of an APOC3 gene and comprising a spacer sequence selected from TABLES 1 and 2,
   [0665] wherein the first region is located 5′ of the second region;
[0666] b. a fusion protein comprising an effector protein and a base editing enzyme, or a nucleic acid encoding the fusion protein.

[0667] Embodiment 137: A system comprising
[0668] a. a guide nucleic acid or a DNA molecule encoding the guide nucleic acid, wherein the guide nucleic acid comprises:
   [0669] i. a first region comprising a protein binding sequence; and
   [0670] ii. a second region comprising a targeting sequence that is complementary to a target sequence of an PCSK9 gene and comprising a spacer sequence selected from TABLES 3 and 4,
   [0671] wherein the first region is located 5′ of the second region;
[0672] b. a fusion protein comprising an effector protein and a base editing enzyme, or a nucleic acid encoding the fusion protein.

[0673] Embodiment 138: A system comprising
[0674] a. a guide nucleic acid or a DNA molecule encoding the guide nucleic acid, wherein the guide nucleic acid comprises:
   [0675] i. a first region comprising a protein binding sequence; and
   [0676] ii. a second region comprising a targeting sequence that is complementary to a target sequence of an ANGPTL3 gene and comprising a spacer sequence selected from TABLES 5 and 6,
   [0677] wherein the first region is located 5′ of the second region;
[0678] b. a fusion protein comprising an effector protein and a base editing enzyme, or a nucleic acid encoding the fusion protein.

[0679] Embodiment 139: A system comprising
[0680] a. a guide nucleic acid or a DNA molecule encoding the guide nucleic acid, wherein the guide nucleic acid comprises a nucleotide sequence that is at least 70%, at least 75%, at least 80%, at least 85%, at least 90%, at least 95%, or 100% identical to a sequence selected from TABLES 8-10; and
[0681] b. a fusion protein comprising an effector protein and a base editing enzyme, or a nucleic acid encoding the fusion protein, wherein the fusion protein comprises an amino acid sequence that is at least 90% or at least 95% identical to SEQ ID NO: 798.

[0682] Embodiment 140: A system comprising
[0683] a. a guide nucleic acid or a DNA molecule encoding the guide nucleic acid, wherein the guide nucleic acid comprises a nucleotide sequence that is at least 70%, at least 75%, at least 80%, at least 85%, at least 90%, at least 95%, or 100% identical to a sequence selected from TABLES 11-13; and
[0684] b. a fusion protein comprising an effector protein and a base editing enzyme, or a nucleic acid encoding the fusion protein, wherein the fusion protein comprises an amino acid sequence that is at least 90% or at least 95% identical to SEQ ID NO: 797.

[0685] Embodiment 141: A method of reducing triglycerides in a subject in need thereof, the method comprising administering: (a) an effector protein or a nucleic acid encoding an effector protein, wherein the effector protein comprises an amino acid sequence that is at least 90%, at least 95%, at least 98%, at least 99% or 100% identical to an amino acid sequence selected from SEQ ID NO: 32 and SEQ ID NO: 773; and (b) a guide nucleic acid comprising a spacer sequence that hybridizes to a target sequence in the human APOC3 gene.

[0686] Embodiment 142: The method of embodiment 141, wherein the subject has hypertriglyceridemia, hypercholesterolemia, or a combination thereof.

[0687] Embodiment 143: The method of any one of embodiments 141 or 142, wherein the effector protein is described in TABLES 15-19.

[0688] Embodiment 144: A composition comprising
[0689] a) a fusion protein or a nucleic acid encoding the fusion protein, wherein the fusion protein comprises:
   [0690] i. an effector protein; and
   [0691] ii. a methyltransferase; and
[0692] b) a guide RNA or a nucleic acid encoding the guide RNA, wherein the guide RNA comprises:
   [0693] i. a first region comprising a protein binding sequence; and
   [0694] ii. a second region comprising a spacer sequence that hybridizes to
[0695] a target sequence of an APOC3 gene.

[0696] Embodiment 145: A composition or system comprising a guide ribonucleic acid (RNA) or a polynucleotide encoding the same, wherein the guide RNA comprises:
[0697] a) a first region comprising a protein binding sequence, and
[0698] b) a second region comprising a targeting sequence that is complementary to a target sequence that is within an APOC3 gene,
   [0699] wherein the target sequence is adjacent to a protospacer adjacent motif (PAM) selected from 5′-NTTN-3′ and 5′-NNTN-3′.

[0700] Embodiment 146: The composition or system of embodiment 145, wherein the targeting sequence comprises a nucleotide sequence that is at least 70%, at least 75%, at least 80%, at least 85%, at least 90%, at least 95% or 100% identical to any one of SEQ ID NOs: 1-15, 67-72, 207, 209-299, 804-805, 823-825, 830-1399, 2018-2026, and 2084-2086.

[0701] Embodiment 147: The composition or system of any one of embodiments 145-146, wherein the PAM is 5′-NTTN-3′ and wherein
[0702] a) the targeting sequence comprises a nucleotide sequence that is at least 70%, at least 75%, at least 80%, at least 85%, at least 90%, at least 95% or 100% identical to any one of SEQ ID NOs: 1-15, 67-72, 207, 804-805, and 830-999, and
[0703] b) the protein binding sequence comprises a nucleotide sequence that is at least 70%, at least 75%, at least 80%, at least 85%, at least 90%, at least 95% or 100% identical to any one of SEQ ID NOs: 16 and 38-43.

[0704] Embodiment 148: The composition or system of embodiment 147, wherein the composition or system comprises an effector protein or a nucleic acid encoding the same, wherein the effector protein comprises an amino acid sequence that is at least 70%, at least 75%, at least 80%, at least 85%, at least 90%, at least 95%, at least 97%, at least 98%, at least 99%, or 100% identical to any one of SEQ ID NOs: 32, 34, 794, or 2090.

[0705] Embodiment 149: The composition or system of any one of embodiments 145-148, wherein the guide RNA comprises a nucleotide sequence that is at least 70%, at least 75%, at least 80%, at least 85%, at least 90%, at least 95% or 100% identical to any one of SEQ ID NOs: 17-31, 73-78, 491, 815-816, and 1400-1569.

[0706] Embodiment 150: The composition or system of embodiments 145 or 146, wherein the PAM is 5′-NNTN-3′, and wherein
[0707] a) the targeting sequence comprises a nucleotide sequence that is at least 70%, at least 75%, at least 80%, at least 85%, at least 90%, at least 95% or 100% identical to any one of SEQ ID NOs: 209-299, 823-825, 1000-1399, 2018-2026, and 2084-2086, and
[0708] b) the protein binding sequence comprises a nucleotide sequence that is at least 70%, at least 75%, at least 80%, at least 85%, at least 90%, at least 95% or 100% identical to SEQ ID NO: 488.

[0709] Embodiment 151: The composition or system of embodiment 150, wherein the protein binding sequence further comprises a nucleotide sequence that is at least 70%, at least 75%, at least 80%, at least 85%, at least 90%, at least 95% or 100% identical to SEQ ID NOs: 489 or 490.

[0710] Embodiment 152: The composition or system of embodiment 150 or embodiment 151, wherein the composition or system comprises an effector protein or a nucleic acid encoding the same, wherein the effector protein comprises an amino acid sequence that is at least 70%, at least 75%, at least 80%, at least 85%, at least 90%, at least 95%, at least 97%, at least 98%, at least 99%, or 100% identical to any one of SEQ ID NOs: 773, 775, or 793.

[0711] Embodiment 153: The composition or system of any one of embodiments 145, 146, and 150-152, wherein the guide RNA comprises a nucleotide sequence that is at least 70%, at least 75%, at least 80%, at least 85%, at least 90%, at least 95% or 100% identical to any one of SEQ ID NOs: 494-584, 826-828, 1570-1969, 2075-2083, and 2087-2089.

[0712] Embodiment 154: A composition or system comprising a guide ribonucleic acid (RNA) or a polynucleotide encoding the same, wherein the guide RNA comprises:
[0713] a) a first region comprising a protein binding sequence, and
[0714] b) a second region comprising a targeting sequence that is complementary to a target sequence that is within a PCSK9 gene, wherein the target sequence is adjacent to a protospacer adjacent motif (PAM) selected from 5′-NTTN-3′ and 5′-NNTN-3′.

[0715] Embodiment 155: The composition or system of embodiment 154, wherein the targeting sequence comprises a nucleotide sequence that is at least 70%, at least 75%, at least 80%, at least 85%, at least 90%, at least 95% or 100% identical to any one of SEQ ID NOs: 79-140, 208, 300-487, 799-803, 809, 822, and 1970-1995.

[0716] Embodiment 156: The composition or system of any one of embodiments 154-155, wherein the PAM is 5′-NTTN-3′ and wherein
[0717] a) the targeting sequence comprises a nucleotide sequence that is at least 70%, at least 75%, at least 80%, at least 85%, at least 90%, at least 95% or 100% identical to any one of SEQ ID NOs: 79-140, 208, 799-803, and 809, and
[0718] b) the protein binding sequence comprises a nucleotide sequence that is at least 70%, at least 75%, at least 80%, at least 85%, at least 90%, at least 95% or 100% identical to any one of SEQ ID NOs: 16 and 38-43.

[0719] Embodiment 157: The composition or system of embodiment 156, wherein the composition or system comprises an effector protein or a nucleic acid encoding the same, wherein the effector protein comprises an amino acid sequence that is at least 70%, at least 75%, at least 80%, at least 85%, at least 90%, at least 95%, at least 97%, at least 98%, at least 99%, or 100% identical to any one of SEQ ID NOs: 32, 34, 794, or 2090.

[0720] Embodiment 158: The composition or system of any one of embodiments 154-157, wherein the guide RNA comprises a nucleotide sequence that is at least 70%, at least 75%, at least 80%, at least 85%, at least 90%, at least 95% or 100% identical to any one of SEQ ID NOs: 141-202, 492-493, 810-814, 820.

[0721] Embodiment 159: The composition or system of embodiments 154 or 155, wherein the PAM is 5′-NNTN-3′, and wherein
[0722] a) the targeting sequence comprises a nucleotide sequence that is at least 70%, at least 75%, at least 80%, at least 85%, at least 90%, at least 95% or 100% identical to any one of SEQ ID NOs: 300-487, 822, and 1970-1995, and
[0723] b) the protein binding sequence comprises a nucleotide sequence that is at least 70%, at least 75%, at least 80%, at least 85%, at least 90%, at least 95% or 100% identical to SEQ ID NO: 488.

[0724] Embodiment 160: The composition or system of embodiment 159, wherein the protein binding sequence further comprises a nucleotide sequence that is at least 70%, at least 75%, at least 80%, at least 85%, at least 90%, at least 95% or 100% identical to SEQ ID NOs: 489 or 490.

[0725] Embodiment 161: The composition or system of embodiments 159 or 160, wherein the composition or system comprises an effector protein or a nucleic acid encoding the same, wherein the effector protein comprises an amino acid sequence that is at least 70%, at least 75%, at least 80%, at least 85%, at least 90%, at least 95%, at least 97%, at least 98%, at least 99%, or 100% identical to any one of SEQ ID NOs: 773, 775, or 793.

[0726] Embodiment 162: The composition or system of any one of embodiments 154, 155, and 159-161, wherein the guide RNA comprises a nucleotide sequence that is at least 70%, at least 75%, at least 80%, at least 85%, at least 90%, at least 95% or 100% identical to any one of SEQ ID NOs: 585-772, 829, and 2027-2052.

[0727] Embodiment 163: A composition or system comprising a guide ribonucleic acid (RNA) or a polynucleotide encoding the same, wherein the guide RNA comprises:
[0728] a) a first region comprising a protein binding sequence, and
[0729] b) a second region comprising a targeting sequence that is complementary to a target sequence that is within a ANGPTL3 gene,
   [0730] wherein the target sequence is adjacent to a protospacer adjacent motif (PAM) selected from 5′-NTTN-3′ and 5′-NNTN-3′.

[0731] Embodiment 164: The composition or system of embodiment 163, wherein the targeting sequence comprises a nucleotide sequence that is at least 70%, at least 75%, at least 80%, at least 85%, at least 90%, at least 95% or 100% identical to any one of SEQ ID NOs: 806-808 and 1996-2017.

[0732] Embodiment 165: The composition or system of any one of embodiments 163-165, wherein the PAM is 5′-NTTN-3′ and wherein
[0733] a) the targeting sequence comprises a nucleotide sequence that is at least 70%, at least 75%, at least 80%, at least 85%, at least 90%, at least 95% or 100% identical to any one of SEQ ID NOs: 806-808, and
[0734] b) the protein binding sequence comprises a nucleotide sequence that is at least 70%, at least 75%, at least 80%, at least 85%, at least 90%, at least 95% or 100% identical to any one of SEQ ID NOs: 16 and 38-43.

[0735] Embodiment 166: The composition or system of embodiments 165, wherein the composition or system comprises an effector protein or a nucleic acid encoding the same, wherein the effector protein comprises an amino acid sequence that is at least 70%, at least 75%, at least 80%, at least 85%, at least 90%, at least 95%, at least 97%, at least 98%, at least 99%, or 100% identical to any one of SEQ ID NOs: 32, 34, 794, or 2090.

[0736] Embodiment 167: The composition or system of any one of embodiments 163-166, wherein the guide RNA comprises a nucleotide sequence that is at least 70%, at least 75%, at least 80%, at least 85%, at least 90%, at least 95% or 100% identical to any one of SEQ ID NOs: 817-819.

[0737] Embodiment 168: The composition or system of embodiments 166 or 167, wherein the PAM is 5′-NNTN-3′, and wherein
[0738] a) the targeting sequence comprises a nucleotide sequence that is at least 70%, at least 75%, at least 80%, at least 85%, at least 90%, at least 95% or 100% identical to any one of SEQ ID NOs: 1996-2017, and
[0739] b) the protein binding sequence comprises a nucleotide sequence that is at least 70%, at least 75%, at least 80%, at least 85%, at least 90%, at least 95% or 100% identical to SEQ ID NO: 488.

[0740] Embodiment 169: The composition or system of embodiment 168, wherein the protein binding sequence further comprises a nucleotide sequence that is at least 70%, at least 75%, at least 80%, at least 85%, at least 90%, at least 95% or 100% identical to SEQ ID NOs: 489 or 490.

[0741] Embodiment 170: The composition or system of embodiments 168 or 169, wherein the composition or system comprises an effector protein or a nucleic acid encoding the same, wherein the effector protein comprises an amino acid sequence that is at least 70%, at least 75%, at least 80%, at least 85%, at least 90%, at least 95%, at least 97%, at least 98%, at least 99%, or 100% identical to SEQ ID NOs: 773, 775, or 793.

[0742] Embodiment 171: The composition or system of any one of embodiments 163, 164, and 168-170, wherein the guide RNA comprises a nucleotide sequence that is at least 70%, at least 75%, at least 80%, at least 85%, at least 90%, at least 95% or 100% identical to any one of SEQ ID NOs: 2053-2074.

[0743] Embodiment 172: The composition or system of any of embodiments 148, 149, 152, 153, 157, 158, 161, 162, 166, 167, 170, or 171 wherein the effector protein is fused to an effector partner protein, optionally wherein the effector partner protein is selected from a deaminase, a reverse transcriptase, a recombinase, and a methyltransferase.

[0744] Embodiment 173: The composition or system of any of embodiments 152, 161, or 170, wherein the targeting sequence is at least 80%, at least 85%, at least 90%, at least 95%, or 100% identical to a sequence selected from SEQ ID NOs: 1970-2026, wherein the effector protein is at least 80%, at least 85%, at least 90%, at least 95%, or 100% identical to any one of SEQ ID NOs: 773, 775, or 793, and wherein the effector protein is fused to a base editing enzyme.

[0745] Embodiment 174: The composition or system of embodiment 148, wherein the targeting sequence is at least 80%, at least 85%, at least 90%, at least 95%, or 100% identical to a sequence selected from SEQ ID NOs: 830-999, wherein the effector protein is at least 80%, at least 85%, at least 90%, at least 95%, or 100% identical to any one of SEQ ID NOs: 32, 34, 794, or 2090 and wherein the effector protein is fused to a KRAB domain, a methyltransferase, or a combination thereof.

[0746] Embodiment 175: The composition or system of embodiment 152, wherein the targeting sequence is at least 80%, at least 85%, at least 90%, at least 95%, or 100% identical to a sequence selected from SEQ ID NOs: 1000-1399, wherein the effector protein is at least 80%, at least 85%, at least 90%, at least 95%, or 100% identical to any one of SEQ ID NOs: 773, 775, or 793, and wherein the effector protein is fused to a KRAB domain, a methyltransferase, or a combination thereof.

[0747] Embodiment 176: An expression cassette comprising, from 5′ to 3′:
[0748] a) a first inverted terminal repeat (ITR);
[0749] b) a first promoter sequence operably linked to a nucleic acid sequence encoding a guide RNA wherein the guide RNA comprises:
   [0750] i. a first region comprising a protein binding sequence; and
   [0751] ii. a second region comprising a spacer sequence that is complementary to a target sequence of an APOC3 gene, wherein the spacer sequence is at least 70%, at least 75%, at least 80%, at least 85%, at least 90%, at least 95% or 100% identical to any one of SEQ ID NOs: 1-15, 67-72, 207, 209-299, 804-805, 823-825, 830-1399, 2018-2026, and 2084-2086;
[0752] c) a second promoter sequence operably linked to a nucleic acid sequence encoding an effector protein;
[0753] d) a poly(A) signal; and
[0754] e) a second ITR.

[0755] Embodiment 177: An expression cassette comprising, from 5′ to 3′:
[0756] a) a first inverted terminal repeat (ITR);
[0757] b) a first promoter sequence operably linked to a nucleic acid sequence encoding a guide RNA wherein the guide RNA comprises:
   [0758] iii. a first region comprising a protein binding sequence; and
   [0759] iv. a second region comprising a spacer sequence that is complementary to a target sequence of a PCSK9 gene, wherein the spacer sequence is at least 70%, at least 75%, at least 80%, at least 85%, at least 90%, at least 95% or 100% identical to any one of SEQ ID NOs: 79-140, 208, 300-487, 799-803, 809, 822, and 1970-1995;
[0760] c) a second promoter sequence operably linked to a nucleic acid sequence encoding an effector protein;
[0761] d) a poly(A) signal; and
[0762] e) a second ITR.

[0763] Embodiment 178: An expression cassette comprising, from 5′ to 3′:
[0764] a) a first inverted terminal repeat (ITR);
[0765] b) a first promoter sequence operably linked to a nucleic acid sequence encoding a guide RNA wherein the guide RNA comprises:
   [0766] v. a first region comprising a protein binding sequence; and
   [0767] vi. a second region comprising a spacer sequence that is complementary to a target sequence of a ANGPTL3 gene, wherein the spacer sequence is at least 70%, at least 75%, at least 80%, at least 85%, at least 90%, at least 95% or 100% identical to any one of SEQ ID NOs: 806-808 and 1996-2017;
[0768] c) a second promoter sequence operably linked to a nucleic acid sequence encoding an effector protein;
[0769] d) a poly(A) signal; and
[0770] e) a second ITR.

[0771] Embodiment 179: The expression cassette of any of embodiments 176-178, wherein the expression cassette further comprises a WPRE sequence located between the nucleic acid sequence encoding an effector protein and the poly(A) signal.

[0772] Embodiment 180: The expression cassette of any of embodiments 176-179, wherein 5 the first promoter is a U6 promoter, the second promoter is a CK8E promoter or a SPC5 promoter or a combination thereof.

[0773] Embodiment 181: The expression cassette of any one of embodiments 176-180, wherein the poly(A) signal is a bGH or an hGH poly(A) signal.

[0774] Embodiment 182: The expression cassette of any one of embodiments 176-181, wherein
[0775] a) the targeting sequence comprises a nucleotide sequence that is at least 70%, at least 75%, at least 80%, at least 85%, at least 90%, at least 95% or 100% identical to any one of SEQ ID NOs: 1-15, 67-72, 207, 804-805, and 830-999, and
[0776] b) the effector protein comprises an amino acid sequence that is at least 70%, at least 75%, at least 80%, at least 85%, at least 90%, at least 95% or 100% identical to any one of SEQ ID NOs: 32, 34, 794, or 2090,
[0777] c) optionally wherein the protein binding sequence comprises a nucleotide sequence that is at least 70%, at least 75%, at least 80%, at least 85%, at least 90%, at least 95% or 100% identical to any one of SEQ ID NOs: 16 and 38-43.

[0778] Embodiment 183: The expression cassette of embodiment 182, wherein the guide RNA comprises a nucleotide sequence that is at least 70%, at least 75%, at least 80%, at least 85%, at least 90%, at least 95% or 100% identical to any one of SEQ ID NOs: 17-31, 73-78, 491, 815-816, and 1400-1569.

[0779] Embodiment 184: The expression cassette of any one of embodiments 176-181, wherein
[0780] a) the targeting sequence comprises a nucleotide sequence that is at least 70%, at least 75%, at least 80%, at least 85%, at least 90%, at least 95% or 100% identical to any one of SEQ ID NOs: 79-140, 208, 799-803, and 809, and
[0781] b) the effector protein comprises an amino acid sequence that is at least 70%, at least 75%, at least 80%, at least 85%, at least 90%, at least 95% or 100% identical to any one of SEQ ID NOs: 32, 34, 794, or 2090,
[0782] c) optionally wherein the protein binding sequence comprises a nucleotide sequence that is at least 70%, at least 75%, at least 80%, at least 85%, at least 90%, at least 95% or 100% identical to any one of SEQ ID NOs: 16 and 38-43.

[0783] Embodiment 185: The expression cassette of embodiment 184, wherein the guide RNA comprises a nucleotide sequence that is at least 70%, at least 75%, at least 80%, at least 85%, at least 90%, at least 95% or 100% identical to any one of SEQ ID NOs: 141-202, 492-493, 810-814, and 820.

[0784] Embodiment 186: The expression cassette of any one of embodiments 176-181, wherein
[0785] a) the targeting sequence comprises a nucleotide sequence that is at least 70%, at least 75%, at least 80%, at least 85%, at least 90%, at least 95% or 100% identical to any one of SEQ ID NOs: 806-808, and
[0786] b) the effector protein comprises an amino acid sequence that is at least 70%, at least 75%, at least 80%, at least 85%, at least 90%, at least 95% or 100% identical to SEQ ID NOs: 32, 34, 794, or 2090,
[0787] c) optionally wherein the protein binding sequence comprises a nucleotide sequence that is at least 70%, at least 75%, at least 80%, at least 85%, at least 90%, at least 95% or 100% identical to any one of SEQ ID NOs: 16 and 38-43.

[0788] Embodiment 187: The expression cassette of embodiment 186, wherein the guide RNA comprises a nucleotide sequence that is at least 70%, at least 75%, at least 80%, at least 85%, at least 90%, at least 95% or 100% identical to any one of SEQ ID NOs: 817-819.

[0789] Embodiment 188: The expression cassette of any one of embodiments 176-181, wherein
[0790] a) the targeting sequence comprises a nucleotide sequence that is at least 70%, at least 75%, at least 80%, at least 85%, at least 90%, at least 95% or 100% identical to any one of SEQ ID NOs: 209-299, 823-825, 1000-1399, 2018-2026, and 2084-2086, and
[0791] b) the effector protein comprises an amino acid sequence that is at least 70%, at least 75%, at least 80%, at least 85%, at least 90%, at least 95% or 100% identical to any one of SEQ ID NOs: 773, 775, or 793,
[0792] c) optionally wherein the protein binding sequence comprises a nucleotide sequence that is at least 70%, at least 75%, at least 80%, at least 85%, at least 90%, at least 95% or 100% identical to SEQ ID NOs: 488 or 489, or a combination thereof.

[0793] Embodiment 189: The expression cassette of embodiment 188, wherein the guide RNA comprises a nucleotide sequence that is at least 70%, at least 75%, at least 80%, at least 85%, at least 90%, at least 95% or 100% identical to any one of SEQ ID NOs: 494-584, 826-828, 1570-1969, 2075-2083, and 2087-2089.

[0794] Embodiment 190: The expression cassette of any one of embodiments 176-181, wherein
[0795] a) the targeting sequence comprises a nucleotide sequence that is at least 70%, at least 75%, at least 80%, at least 85%, at least 90%, at least 95% or 100% identical to any one of SEQ ID NOs: 300-487, 822, and 1970-1995, and
[0796] b) the effector protein comprises an amino acid sequence that is at least 70%, at least 75%, at least 80%, at least 85%, at least 90%, at least 95% or 100% identical to any one of SEQ ID NOs: 773, 775, or 793,
[0797] c) optionally wherein the protein binding sequence comprises a nucleotide sequence that is at least 70%, at least 75%, at least 80%, at least 85%, at least 90%, at least 95% or 100% identical to SEQ ID NOs: 488 or 489, or a combination thereof.

[0798] Embodiment 191: The expression cassette of embodiment 190, wherein the guide RNA comprises a nucleotide sequence that is at least 70%, at least 75%, at least 80%, at least 85%, at least 90%, at least 95% or 100% identical to any one of SEQ ID NOs: 585-772, 829, and 2027-2052.

[0799] Embodiment 192:The expression cassette of any one of embodiments 176-181, wherein
[0800] a) the targeting sequence comprises a nucleotide sequence that is at least 70%, at least 75%, at least 80%, at least 85%, at least 90%, at least 95% or 100% identical to any one of SEQ ID NOs: 1996-2017, and
[0801] b) the effector protein comprises an amino acid sequence that is at least 70%, at least 75%, at least 80%, at least 85%, at least 90%, at least 95% or 100% identical to any one of SEQ ID NOs: 773, 775, or 793,
[0802] c) optionally wherein the protein binding sequence comprises a nucleotide sequence that is at least 70%, at least 75%, at least 80%, at least 85%, at least 90%, at least 95% or 100% identical to SEQ ID NOs: 488 or 489, or a combination thereof.

[0803] Embodiment 193: The expression cassette of embodiment 192, wherein the guide RNA comprises a nucleotide sequence that is at least 70%, at least 75%, at least 80%, at least 85%, at least 90%, at least 95% or 100% identical to any one of SEQ ID NOs: 2053-2074.

[0804] Embodiment 194: An adeno-associated virus (AAV) vector comprising the expression cassette of any one of embodiments 176-193.

[0805] Embodiment: 195: A lipid nanoparticle (LNP) comprising the composition or system of any one of embodiments 145-175, the expression caste of any one of embodiments 176-193, or the AAV vector of embodiment 194.

[0806] Embodiment: 196: A pharmaceutical composition comprising the composition or system of any one of embodiments 145-175, the expression caste of any one of embodiments 176-193, or the AAV vector of embodiment 194, and a pharmaceutical acceptable carrier.

[0807] Embodiment 197: A cell, or population of cells, comprising the composition or system of any one of embodiments 145-175, the expression caste of any one of embodiments 176-193, the AAV vector of embodiment 194, or the LNP of embodiment 195.

[0808] Embodiment 198: A method of modifying an APOC3 gene, comprising contacting the APOC3 gene, with the composition or system of any one embodiments 145-175, the expression caste of any one of embodiments 176-193, the AAV vector of embodiment 194, the LNP of embodiment 195, or the pharmaceutical composition of embodiment 196.

[0809] Embodiment 199: A method of modifying a PCSK9 gene, comprising contacting the PCSK9 gene with the composition or system of any one embodiments 145-175, the expression caste of any one of embodiments 176-193, the AAV vector of embodiment 194, the LNP of embodiment 195, or the pharmaceutical composition of embodiment 196.

[0810] Embodiment 200: A method of modifying an ANGPTL3 gene, comprising contacting the PCSK9 gene with the composition or system of any one embodiments 145-175, the expression caste of any one of embodiments 176-193, the AAV vector of embodiment 194, the LNP of embodiment 195, or the pharmaceutical composition of embodiment 196.

[0811] Embodiment 201: The method of any one of embodiments 198-200, wherein the modifying of the APOC3 gene, the PCSK9 gene, or the ANGPTL3 gene reduces the expression of the APOC3 gene, the PCSK9 gene, or the ANGPTL3 gene.

[0812] Embodiment 202: The method of embodiment 201, wherein the reduced expression of the APOC3 gene, the PCSK9 gene, or the ANGPTL3 gene is transient.

[0813] Embodiment 203: The method of embodiment 201, wherein the reduced expression of the APOC3 gene, the PCSK9 gene, or the ANGPTL3 gene is permanent.

[0814] Embodiment 204: A method of treating or preventing a disease in a subject in need thereof, comprising administering the composition or system of any one of embodiments 145-175, the expression caste of any one of embodiments 176-193, the AAV vector of embodiment 194, the LNP of embodiment 195, or the pharmaceutical composition of embodiment 196, wherein the disease is associated with increased expression of APOC3.

[0815] Embodiment 205: A method of treating or preventing a disease in a subject in need thereof, comprising administering the composition or system of any one of embodiments 145-175, the expression caste of any one of embodiments 176-193, the AAV vector of embodiment 194, the LNP of embodiment 195, or the pharmaceutical composition of embodiment 196, wherein the disease is associated with increased expression of PCSK9.

[0816] Embodiment 206: A method of treating or preventing a disease in a subject in need thereof, comprising administering the composition or system of any one of embodiments 145-175, the expression caste of any one of embodiments 176-193, the AAV vector of embodiment 194, the LNP of embodiment 195, or the pharmaceutical composition of embodiment 196, wherein the disease is associated with increased expression of ANGPTL3.

[0817] Embodiment 207: The method of any one of embodiments 198-206, comprising modifying the APOC3 gene, the PCSK9 gene, or the ANGPTL3 gene in a cell.

[0818] Embodiment 208: The method of embodiment 207, wherein the cell is in vivo.

[0819] Embodiment 209: The method of any of embodiments 207 or 208, wherein the cell is within a subject having a cardiovascular disease.

[0820] Embodiment 210: The method of embodiment 209, wherein the cardiovascular disease is atherosclerotic cardiovascular disease or is coronary artery disease (CAD).

[0821] Embodiment 211: The method of any of embodiments 209 or 210, wherein the cell is within a subject having a chronic kidney disease (CKD).

[0822] Embodiment 212: The method of any of embodiments 209 or 210, wherein the cell is within a subject having familial chylomicronemia syndrome (FCS).

[0823] Embodiment 213: The method of any of embodiments 209 or 210, wherein the cell is within a subject having lipodystrophy.

[0824] Embodiment 214: The method of any of embodiments 209 or 210, wherein the cell is within a subject having hypertriglyceridemia.

[0825] Embodiment 215: The method of embodiment 214, wherein the disease is severe hypertriglyceridemia.

[0826] Embodiment 216: A cell modified by the composition, system, expression cassette, AAV vector, or method of any one of embodiments 145-215.

[0827] Embodiment 217: A system comprising a guide ribonucleic acid (RNA) or a polynucleotide encoding the same, wherein the guide RNA comprises:
[0828] a) a first region comprising SEQ ID NO: 39, and
[0829] b) a second region comprising SEQ ID NO: 10, which is complementary to a target sequence that is within an APOC3 gene,
   [0830] wherein the target sequence is adjacent to a protospacer adjacent motif (PAM) 5′-NNTN-3′.

[0831] Embodiment 218: The system of embodiment 217, wherein the second region consists of SEQ ID NO: 10.

[0832] Embodiment 219: The system of embodiments 217 or 218, wherein the guide RNA comprises the amino acid sequence of SEQ ID NO: 26.

[0833] Embodiment 220: The system of embodiment 219, wherein the system further comprises an effector protein, wherein the effector protein comprises the amino acid sequence of SEQ ID NOs: 32, 34, 794, or 2090.

[0834] Embodiment 221: A composition comprising a guide ribonucleic acid (RNA) or a polynucleotide encoding the same, wherein the guide RNA comprises:
[0835] a) a first region comprising SEQ ID NO: 39, and
[0836] b) a second region comprises SEQ ID NO: 10.

[0837] Embodiment 222: The composition of embodiment 221, wherein the second region consists of SEQ ID NO: 10.

[0838] Embodiment 223: The composition of embodiments 221 or 222, wherein the guide RNA sequence comprises SEQ ID NO: 26.

[0839] Embodiment 224: An expression cassette comprising, from 5′ to 3′:
[0840] a) a first inverted terminal repeat (ITR);
[0841] b) a first promoter sequence operably linked to a nucleic acid sequence encoding a guide ribonucleic acid (RNA) wherein the guide RNA comprises:
   [0842] vii. a first region comprising SEQ ID NO: 39; and
   [0843] viii. a second region comprising a spacer sequence that is complementary to a target sequence of an APOC3 gene, wherein the spacer sequence comprises SEQ ID NO: 10;
[0844] c) a second promoter sequence operably linked to a nucleic acid sequence encoding an effector protein;
[0845] d) a poly(A) signal; and
[0846] e) a second ITR.

[0847] Embodiment 225: The expression cassette of embodiment 224, wherein the second region consists of SEQ ID NO: 10.

[0848] Embodiment 226: The expression cassette of any one of embodiments 224 or 225, wherein the guide RNA sequence comprises SEQ ID NO: 26.

[0849] Embodiment 227: A recombinant adeno-associated virus (rAAV) expression cassette comprising sequences encoding
[0850] a) a first inverted terminal repeat (ITR) and a first promoter;
[0851] b) an effector protein that comprises the amino acid sequence of SEQ ID NOs: 32, 34, 794, or 2090;
[0852] c) optionally a second promoter;
[0853] d) a second polynucleotide encoding a guide ribonucleic acid (RNA), wherein the guide RNA comprises a spacer sequence comprising SEQ ID NO: 10 and a repeat sequence comprising SEQ ID NO: 39; and
[0854] e) a second ITR,
[0855] wherein the AAV expression cassette is a self-complementary AAV vector.

[0856] Embodiment 228: The rAAV expression cassette of embodiment 227, wherein the spacer sequence consists of SEQ ID NO: 10.

[0857] Embodiment 229: The rAAV expression cassette of any one of embodiments 227 or 228, wherein the guide RNA sequence comprises SEQ ID NO: 26.

[0858] Embodiment 230: A nucleic acid expression vector that encodes a guide ribonucleic acid (RNA), wherein the guide RNA comprises a spacer sequence wherein the spacer sequence comprises SEQ ID NO: 10 and a repeat sequence comprising SEQ ID NO: 39.

[0859] Embodiment 231: The nucleic acid expression vector of embodiments 230, wherein the spacer sequence consists of SEQ ID NO: 10.

[0860] Embodiment 232: The nucleic acid expression vector of any one of embodiments 230 or 231, where in the guide RNA sequence comprises SEQ ID NO: 26.

[0861] Embodiment 233: A guide ribonucleic acid (RNA) or a polynucleotide encoding the same, wherein the guide RNA comprises:
[0862] a. a first region comprising SEQ ID NO: 39, and
[0863] b. a second region comprises SEQ ID NO: 10.

[0864] Embodiment 234: The guide RNA of embodiment 233, wherein the second region consists of SEQ ID NO: 10.

[0865] Embodiment 235: The guide RNA of any one of embodiment 233 or 234, wherein the guide RNA comprises SEQ ID NO: 26.

[0866] Embodiment 236: A lipid nanoparticle (LNP) comprising the system of embodiments 217-220, the composition of embodiments 221-223, the expression cassette of embodiments 224-226, the rAAV of embodiments 227-229, the nucleic acid expression vector of embodiments 230-232, or the guide RNA of embodiments 233-235.

[0867] Embodiment 237: A pharmaceutical comprising the system of embodiments 217-220, the composition of embodiments 221-223, the expression cassette of embodiments 224-226, the rAAV of embodiments 227-229, the nucleic acid expression vector of embodiments 230-232, the guide RNA of embodiments 233-235, or the LNP of embodiment 236, and a pharmaceutically acceptable carrier.

[0868] Embodiment 238: A cell modified by the system of embodiments 217-220, the composition of embodiments 221-223, the expression cassette of embodiments 224-226, the rAAV of embodiments 227-229, the nucleic acid expression vector of embodiments 230-232, the guide RNA of embodiments 233-235, or the LNP of embodiment 236.

[0869] Embodiment 239: A method of modifying an APOC3 gene, comprising contacting the APOC3 gene with the system of embodiments 217-220, the composition of embodiments 221-223, the expression cassette of embodiments 224-226, the rAAV of embodiments 227-229, the nucleic acid expression vector of embodiments 230-232, the guide RNA of embodiments 233-235, or the LNP of embodiment 236.

[0870] Embodiment 240: A method of treating or preventing a disease in a subject in need thereof, comprising administering the system of embodiments 217-220, the composition of embodiments 221-223, the expression cassette of embodiments 224-226, the rAAV of embodiments 227-229, the nucleic acid expression vector of embodiments 230-232, the guide RNA of embodiments 233-235, or the LNP of embodiment 236, or the pharmaceutical composition of embodiment 237, wherein the disease is associated with increased expression of APOC3.

[0871] Embodiment 241: The method of any of embodiment 240, wherein the disease is a cardiovascular disease, atherosclerotic cardiovascular disease, coronary artery disease (CAD), a chronic kidney disease (CKD), familial chylomicronemia syndrome (FCS), lipodystrophy, hypertriglyceridemia, or severe hypertriglyceridemia.

[0872] Embodiment 242: A system comprising a guide ribonucleic acid (RNA) or a polynucleotide encoding the same, wherein the guide RNA comprises:
[0873] f) a first region comprising SEQ ID NO: 39, and
[0874] g) a second region comprising SEQ ID NO: 71, which is complementary to a target sequence that is within an APOC3 gene,
   [0875] wherein the target sequence is adjacent to a protospacer adjacent motif (PAM) 5′-NNTN-3′.

[0876] Embodiment 243: The system of embodiment 242, wherein the second region consists of SEQ ID NO: 71.

[0877] Embodiment 244: The system of any one of embodiments 242 or 243, wherein the guide RNA comprises the amino acid sequence of SEQ ID NO: 77.

[0878] Embodiment: 245: The system of embodiment 244, wherein the system further comprises an effector protein, wherein the effector protein comprises the amino acid sequence of SEQ ID NOs: 32, 34, 794, or 2090.

[0879] Embodiment 246: A composition comprising a guide ribonucleic acid (RNA) or a polynucleotide encoding the same, wherein the guide RNA comprises:
[0880] h) a first region comprising SEQ ID NO: 39, and
[0881] i) a second region comprising SEQ ID NO: 71.

[0882] Embodiment 247: The composition of embodiment 246, wherein the second region consists of SEQ ID NO: 71.

[0883] Embodiment 248: The composition of any one of embodiments 246 or 247, wherein the guide RNA sequence comprises SEQ ID NO: 77.

[0884] Embodiment 249: An expression cassette comprising, from 5′ to 3′:
[0885] j) a first inverted terminal repeat (ITR);
[0886] k) a first promoter sequence operably linked to a nucleic acid sequence encoding a guide ribonucleic acid (RNA) wherein the guide RNA comprises:
   [0887] ix. a first region comprising SEQ ID NO: 39; and
   [0888] x. a second region comprising a spacer sequence that is complementary to a target sequence of an APOC3 gene, wherein the spacer sequence comprising SEQ ID NO: 71;
[0889] l) a second promoter sequence operably linked to a nucleic acid sequence encoding an effector protein;
[0890] m) a poly(A) signal; and
[0891] n) a second ITR.

[0892] Embodiment 250: The expression cassette of embodiment 249, wherein the second region consists of SEQ ID NO: 71.

[0893] Embodiment 251: The expression cassette of any one of embodiments 249 or 250, wherein the guide RNA sequence comprises SEQ ID NO: 77.

[0894] Embodiment 252: A recombinant adeno-associated virus (rAAV) expression cassette comprising sequences encoding
[0895] o) a first inverted terminal repeat (ITR) and a first promoter;
[0896] p) an effector protein that comprises the amino acid sequence of SEQ ID NOs: 32, 34, 794, or 2090;
[0897] q) optionally a second promoter;
[0898] r) a second polynucleotide encoding a guide ribonucleic acid (RNA), wherein the guide RNA comprises a spacer sequence comprising SEQ ID NO: 71 and a repeat sequence comprising SEQ ID NO: 39; and
[0899] s) a second ITR,
[0900] wherein the AAV expression cassette is a self-complementary AAV vector.

[0901] Embodiment 253: The rAAV expression cassette of embodiment 252, wherein the spacer sequence consists of SEQ ID NO: 77.

[0902] Embodiment 254: The rAAV expression cassette of any one of embodiments 252 or 253, wherein the guide RNA sequence comprises SEQ ID NO: 77.

[0903] Embodiment 255: A nucleic acid expression vector that encodes a guide ribonucleic acid (RNA), wherein the guide RNA comprises a spacer sequence wherein the spacer sequence comprising SEQ ID NO: 71 and a repeat sequence comprising SEQ ID NO: 39.

[0904] Embodiment 256: The nucleic acid expression vector of embodiment 255, wherein the spacer sequence consists of SEQ ID NO: 71.

[0905] Embodiment 257: The nucleic acid expression vector of any one of embodiments 255 or 256, where in the guide RNA sequence comprises SEQ ID NO: 77.

[0906] Embodiment 258: A guide ribonucleic acid (RNA) or a polynucleotide encoding the same, wherein the guide RNA comprises:
[0907] a. a first region comprising SEQ ID NO: 39, and
[0908] b. a second region comprising SEQ ID NO: 71.

[0909] Embodiment 259: The guide RNA of embodiment 258, wherein the second region consists of SEQ ID NO: 71.

[0910] Embodiment 260: The guide RNA of any one of embodiments 258 or 259, wherein the guide RNA comprises SEQ ID NO: 77.

[0911] Embodiment 261: A lipid nanoparticle (LNP) comprising the system of any one of embodiments 242-245, the composition of embodiments 246-248, the expression cassette of embodiments 249-251, the rAAV of embodiments 252-254, the nucleic acid expression vector of embodiments 255-257, or the guide RNA of embodiments 258-260.

[0912] Embodiment 262: A pharmaceutical comprising the of any one of embodiments 242-245, the composition of embodiments 246-248, the expression cassette of embodiments 249-251, the rAAV of embodiments 252-254, the nucleic acid expression vector of embodiments 255-257, the guide RNA of embodiments 258-260, or the LNP of embodiment 261, and a pharmaceutically acceptable carrier.

[0913] Embodiment 263: A cell modified by the system of any one of embodiments 242-245, the composition of embodiments 246-248, the expression cassette of embodiments 249-251, the rAAV of embodiments 252-254, the nucleic acid expression vector of embodiments 255-257, the guide RNA of embodiments 258-260, or the LNP of embodiment 261.

[0914] Embodiment 264: A method of modifying an APOC3 gene, comprising contacting the APOC3 gene with the system of any one of embodiments 242-245, the composition of embodiments 246-248, the expression cassette of embodiments 249-251, the rAAV of embodiments 252-254, the nucleic acid expression vector of embodiments 255-257, the guide RNA of embodiments 258-260, or the LNP of embodiment 261.

[0915] Embodiment 265: A method of treating or preventing a disease in a subject in need thereof, comprising administering the system of any one of embodiments 242-245, the composition of embodiments 246-248, the expression cassette of embodiments 249-251, the rAAV of embodiments 252-254, the nucleic acid expression vector of embodiments 255-257, the guide RNA of embodiments 258-260, or the LNP of embodiment 261, wherein the disease is associated with increased expression of APOC3.

[0916] Embodiment 266: The method of embodiment 265, wherein the disease is a cardiovascular disease, atherosclerotic cardiovascular disease, coronary artery disease (CAD), a chronic kidney disease (CKD), familial chylomicronemia syndrome (FCS), lipodystrophy, hypertriglyceridemia, or severe hypertriglyceridemia.

### EXAMPLES

[0917] The following examples are included for illustrative purposes only and are not intended to limit the scope of the invention.

### Example 1: CasPhi.12 Modifies APOC3

[0918] Mammalian (Macaca fascicularis) skin fibroblasts (CYNOM-K1 Cells) were transfected with plasmids encoding CasPhi.12 L26R and guides targeting APOC3 using Messenger Max in a 96-well format, with a 1:1 mRNA to gRNA ratio (100 ng mRNA+100 ng gRNA=200 ng Total RNA). Guides were human monkey cross-reactive. Results are provided in FIG. 1. FIG. 1 also shows where tested guides target the APOC3 gene.

### Example 2: APOC3 Editing Systems Achieved Greater than 40% Indels and APOC3 Protein Reduction in HepG2 Cells

[0919] HepG2 cells were transfected (MessengerMax) with CasPhi.12 L26R mRNA or CasM.265466 D220R mRNA and various guides targeting human APOC3 gene. SpyCas9 was included as a control. After 5 days, cells were harvested and indels were quantified by NGS. APOC3 protein was quantified by ELISA. Results are provided in FIG. 2. For each guide, the column on the left is the percent indel formation and the column on the right is the percent APOC3 protein knockdown.

### Example 3: Indel Activity of Effector Protein/Guide RNA on APOC3 in Cynomolgus Hepatocytes

[0920] Experiments were performed to assess the efficacy of different APOC3-targeting gRNAs. Briefly, 100,000 primary cynomolgus hepatocytes were transfected with CasPhi.12 L26R mRNA and gRNA (1:1 ratio) combinations at both 200 ng and 50 ng of guide RNA using MessengerMax while rocking in 96-well low attachment plates for 2 hours. Hepatocytes were then transferred to 96-well Collagen I coated plates and cultured for 48 hours, followed by MTS assay and NGS. The gRNAs tested in this assay are as follows: R15590 (SEQ ID NO: 21), R15592 (SEQ ID NO: 23), R15595 (SEQ ID NO: 26), 15596 (SEQ ID NO: 27), and 15600 (SEQ ID NO: 31). Cell viability was not affected by transfection.

[0921] FIGS. 3A-3C show the percent indel formation in three different donors. R15595 had an at least 10% indel formation efficiency in the hepatocytes from all three donors. For each guide, the column on the left is the percent indel formation with 200 ng of the guide RNA and the column on right is the percent indel formation with 50 ng of the guide RNA.

[0922] FIG. 4 shows that (in a separate but similarly performed experiment) increasing the amount of guide RNA transfected (500 ng) and length of incubation (5 days) leads to a concomitant increase in the percent indel formation. Similar levels of editing were obtained with CasM.265466 D220R and guides (R15784 (SEQ ID NO: 583) and R15788 (SEQ ID NO: 584)), also shown in FIG. 4.

### Example 4: Additional APOC3 Guides for CasPhi.12 and CasM.265466 Edit APOC3 in HepG2 Cells

[0923] CasPhi.12 L26R and CasM.265466 D220R were tested with additional APOC3 guide nucleic acids for editing of APOC3 in human cells. HepG2 cells were transfected using MessengerMax with 400 ng RNA in a 1:1 guide:mRNA ratio in 96 well scale. SpyCas9 was used as a control. Cells were harvested after 48 hours and indels quantified via NGS. Guide nucleic acids used with CasM.265466 were designed to hybridize near a PAM of NNTN. Results are provided in FIG. 5A-FIG. 5B. Guides R15579 and R15578 were paired with SpyCas9; guides R17561, R17562, R17563, R17564, R17565, R17566, R15592, and R15595 were paired with CasPhi.12; and the rest of the guides were paired with CasM.265466.

### Example 5: APOC3 Editing Systems Provide APOC3 Protein Reduction in HepG2 Cells

[0924] Guide nucleic acids that provided higher levels of APOC3 indels in Example 4 were transfected with CasPhi.12 L26R or CasM.265466 D220R into HepG2 cells with corresponding nucleases to assess APOC3 protein reduction. HepG2 cells were transfected via MessengerMax with 400 ng RNA in a 1:1 guide:mRNA ratio in 96 well scale. NGS and ELISA were performed after 5 days. Results are provided in FIG. 6. Guide R15579 was paired with SpyCas9; guides R15592, R15595, R17561, R17562, R17563, R17564, R17566, and R17567 were paired with CasPhi.12; and the rest of the guides were paired with CasM.265466.

### Example 6: CasPhi.12 and APOC3 Guides Demonstrate APOC3 Editing Across Multiple Mammalian Cell Lines

[0925] HepG2 cells (20,000 cells/well) were transfected with 400 ng CasPhi.12 L26R mRNA/gRNA (1:1 ratio) using 0.4 uL MessengerMax in a 96-well plate. CYNOM-K1 cells (20,000 cells/well) were transfected with 200 ng CasPhi.12 L26R mRNA/gRNA (1:1 ratio) using 0.2 uL MessengerMax in a 96-well plate. Primary human and monkey hepatocytes (500,000 cells/well) were transfected with 400 ng CasPhi L26R mRNA/gRNA (1:1 ratio) using 0.6 μL MessengerMax in a 96-well plate. Cells were harvested after 48 hours and analyzed by NGS. All guides demonstrated consistent and translatable levels of editing across four human and NHP cell types. Results are shown in FIG. 7, wherein lighter color in the grey-scale heat map is indicative of indel formation.

### Example 7: CasPhi.12 and CasM.265466 Edit APOC3 in Fibroblasts of hAPOC3 Transgenic Mice

[0926] hAPOC3 Mouse fibroblast cells (20,000 cells/well) were transfected with 200 ng mRNA (CasPhi.12 L26R or CasM.265466 D220R) and gRNA at a 1:1 ratio using 0.6 uL MessengerMax in a 96-well plate. Cells were harvested after 48 hours and analyzed by NGS. Results are shown in FIG. 8. Guide R15579 was paired with SpyCas9; guides R15592, R15595, R17561, R17562, R17563, R17566, and R17567 were paired with CasPhi.12; and the rest of the guides were paired with CasM.265466.

### Example 8: Testing Indel Formation of CasPhi.12 Variant in Mice

[0927] WT C57BL/6J male mice (n=3-5), aged 6-8 weeks, were injected IV via tail vein with 2 mg/kg of mRNA encoding nuclease and R8860 guide (1:3 ratio) formulated with CKK-E12. Cas9 mRNA and Pcsk9 guide R8217 were also injected as a control. The study was repeated, each study ended 2-7 days post injection and liver was collected for indel analysis by NGS. Data representative of multiple experiments.

[0928] The results demonstrate that CasPhi.12 1471T produces indels comparable with Cas9 in WT mice in repeat studies with different mRNA lots and formulation runs. The sequences of the gRNAs used in this experiment are provided in TABLE 30. Results are shown in FIG. 9. This example demonstrates a CasPhi.12 variant can be delivered via LNP to a mammal in order to edit a gene in liver tissue.

TABLE 30
Exemplary gRNA sequences

| | | Spacer | PAM |
|---|---|---|---|
| Target Locus | Nuclease | sequence | sequence |
| PCSK9 | SaCas9 | | NNGRRT |
| PCSK9 | CasPhi.12 | GAGCAACGG | TTN (TTG) |
| | 1471T | CGGAAGGU | |
| | (SEQ ID NO: | (SEQ ID | |
| | 2091) | NO: 208) | |

The gRNA for CasPhi.12 comprises a repeat sequence
of AUAGAUUGCUCCUUACGAGGAGAC (SEQ ID NO: 39) and
the full sequence of the guide is mA*mU*mA*GA
UUGCUCCUUACGAGGAGACGAGCAACGGCGGAAmG*mG*mU
(SEQ ID NO: 493)

### Example 9: Modifying Nucleobases of PCSK9, APOC3 and ANGPTL3 in Mammalian Cells with Engineered Variants of CasM.265466 and CasPhi.12

[0929] Briefly, HEK293T cells were transfected with plasmids encoding a base editor fusion protein and guide nucleic acids (150 ng of dCas466-ABE8e fusion plasmid, 150 ng of guide plasmid). Cells were harvested 72 hours later for analysis via NGS.

[0930] The following Effector-base editor fusion proteins were tested: (a) CasM.265466 D220R/E335Q-ABE8e (SEQ ID NO: 797); and (b) CasPhi.12 L26K/E567Q-ABE8e (SEQ ID NO: 798).

[0931] TABLE 31 and TABLE 32 show the spacers and guide nucleic acids that were tested, respectively. Results for CasM.265466 D220R/E335Q are provided in FIG. 9A. Results for CasPhi.12 L26K/E567Q are provided in FIG. 12B. The bar to the left represents mean non-target strand ABE editing percent, and the bar to the right represents mean target position editing.

TABLE 31
Spacer RNAs to be tested

| Intended | Internal | Target | | | SEQ |
|---|---|---|---|---|---|
| Cas* | Ref: | Locus | PAM | Spacer sequence | ID NO: |
| CasPhi.12 | PL34711 | PCSK9 | CTTC | ACCCACCUGUGCCGCGGCGA | 799 |
| CasPhi.12 | PL34712 | PCSK9 | CTTG | CAUGGGGCCAGGAUCCGUGG | 800 |
| CasPhi.12 | PL34713 | PCSK9 | CTTC | UGCAGGCCUUGAAGUUGCCC | 801 |
| CasPhi.12 | PL34714 | PCSK9 | GTTC | GUCGAGCAGGCCAGCAAGUG | 802 |
| CasPhi. 12 | PL34715 | PCSK9 | GTTC | CUCCCAGGCCUGGAGUUUAU | 803 |
| CasPhi.12 | PL34716 | APOC3 | CTTC | CUUGCAGGAACAGAGGUGCC | 804 |
| CasPhi.12 | PL34717 | APOC3 | CTTT | CCUCAGGAGCUUCAGAGGCC | 805 |
| CasPhi.12 | PL34718 | ANGPTL3 | TTTC | UACUUACUUUAAGUGAAGUU | 806 |
| CasPhi.12 | PL34719 | ANGPTL3 | CTTT | UAUCAGCUCAGAAGGACUAG | 807 |
| CasPhi.12 | PL34720 | ANGPTL3 | ATTG | AUUCUAGGCAUUCCUGCUGA | 808 |
| CasPhi.12 | PL34722 | PCSK9 | CTTG | GAAAGACGGAGGCAGCCUGG | 809 |
| CasM.265466 | PL34563 | PCSK9 | TCTA | CACCCGCACCUUGGCGCAGC | 1970 |
| CasM.265466 | PL34564 | PCSK9 | TTTA | GGGCCAGGAUCCGUGGAGGU | 1971 |
| CasM.265466 | PL34565 | PCSK9 | TATA | GCUCACCAGCUCCAGCAGGU | 1972 |
| CasM.265466 | PL34566 | PCSK9 | ATTA | GCUUCUGCAGGCCUUGAAGU | 1973 |
| CasM.265466 | PL34567 | PCSK9 | TTTA | GGGGUCUUACCGGGGGGCUG | 1974 |
| CasM.265466 | PL34568 | PCSK9 | AGTG | GAAAGACGGAGGCAGCCUGG | 1975 |
| CasM.265466 | PL34569 | PCSK9 | TTTA | CUUACCUGUCUGUGGAAGCG | 1976 |
| CasM.265466 | PL34570 | PCSK9 | TATA | UUCGUCGAGCAGGCCAGCAA | 1977 |
| CasM.265466 | PL34571 | PCSK9 | TGTA | GGGCCAUCACUUACCUAUGA | 1978 |
| CasM.265466 | PL34572 | PCSK9 | TTTA | UUCCUCCCAGGCCUGGAGUU | 1979 |
| CasM.265466 | PL34573 | PCSK9 | GGTA | AUGACCUGGAAAGGUGAGGA | 1980 |
| CasM.265466 | PL34574 | PCSK9 | TCTA | CACCAGGCAUUGCAGCCAUG | 1981 |
| CasM.265466 | PL34575 | PCSK9 | ATTA | CUUACCUGCCCCAUGGGUGC | 1982 |
| CasM.265466 | PL34576 | PCSK9 | AATA | CAGUCACCUCCAUGCGCUCG | 1983 |
| CasM.265466 | PL34577 | PCSK9 | CTTG | ACUCUAAGGCCCAAGGGGGC | 1984 |
| CasM.265466 | PL34578 | PCSK9 | AATA | CCCCAGGCUGCAGCUCCCAC | 1985 |
| CasM.265466 | PL34579 | PCSK9 | GGTA | GCAGGUGACCGUGGCCUGCG | 1986 |
| CasM.265466 | PL34580 | PCSK9 | AATG | CCUCGCCGCGGCACAGGUGG | 1987 |
| CasM.265466 | PL34581 | PCSK9 | GTTG | CCAGGCAACCUCCACGGAUC | 1988 |
| CasM.265466 | PL34582 | PCSK9 | TATG | GCGACCUGCUGGAGCUGGUG | 1989 |
| CasM.265466 | PL34583 | PCSK9 | TCTA | AGUGGCGACCUGCUGGAGCU | 1990 |
| CasM.265466 | PL34584 | PCSK9 | ACTG | ACUGUCACACUUGCUGGCCU | 1991 |
| CasM.265466 | PL34585 | PCSK9 | AGTG | CUCCCCAGCCUCAGCUCCCG | 1992 |
| CasM.265466 | PL34586 | PCSK9 | CCTG | GCCCCAACUGUGAUGACCUG | 1993 |
| CasM.265466 | PL34587 | PCSK9 | ACTG | CCCCCCAGCACCCAUGGGGC | 1994 |
| CasM.265466 | PL34588 | PCSK9 | CCTG | CAAAACAGCUGCCAACCUGC | 1995 |
| CasM.265466 | PL34532 | ANGPTL3 | GTTG | CUUACUUUAAGUGAAGUUAC | 1996 |
| CasM.265466 | PL34533 | ANGPTL3 | CCTA | UUUUCUACUUACUUUAAGUG | 1997 |
| CasM.265466 | PL34534 | ANGPTL3 | GCTG | UCCAGACUUUUGUAGAAAAA | 1998 |
| CasM.265466 | PL34535 | ANGPTL3 | CCTG | AAAUACUGACUUACCUGAUU | 1999 |
| CasM.265466 | PL34536 | ANGPTL3 | ACTG | UCAGCUCAGAAGGACUAGUA | 2000 |
| CasM.265466 | PL34537 | ANGPTL3 | CCTA | UCUUACCAUCAUGUUUUACA | 2001 |
| CasM.265466 | PL34538 | ANGPTL3 | CATG | UUGAUUCUAGGCAUUCCUGC | 2002 |
| CasM.265466 | PL34539 | ANGPTL3 | GGTG | UUCAGGUAGUCCAUGGACAU | 2003 |
| CasM.265466 | PL34540 | ANGPTL3 | TCTG | GUCCCCUUACCAUCAAGCCU | 2004 |
| CasM.265466 | PL34541 | ANGPTL3 | GATG | AAACUUUUCUUUUCAGGAGA | 2005 |
| CasM.265466 | PL34542 | ANGPTL3 | CTTG | UCAGAAAAAGAUACCUGAAU | 2006 |
| CasM.265466 | PL34543 | ANGPTL3 | CGTG | UCUCCUUUAGGAGGCUGGUG | 2007 |
| CasM.265466 | PL34544 | ANGPTL3 | TGTG | UCUUGUUUUUCUACAAAAGU | 2008 |
| CasM.265466 | PL34545 | ANGPTL3 | TCTG | AAAGAAAUAGAAAAUCAGGU | 2009 |
| CasM.265466 | PL34546 | ANGPTL3 | TTTG | AAUACUAGUCCUUCUGAGCU | 2010 |
| CasM.265466 | PL34547 | ANGPTL3 | TGTG | AGAAAUGUAAAACAUGAUGG | 2011 |
| CasM.265466 | PL34548 | ANGPTL3 | CCTG | CAUUCAGCAGGAAUGCCUAG | 2012 |
| CasM.265466 | PL34549 | ANGPTL3 | CCTG | GUGGUACAUUCAGCAGGAAU | 2013 |
| CasM.265466 | PL34550 | ANGPTL3 | GGTA | AAUUAAUGUCCAUGGACUAC | 2014 |
| CasM.265466 | PL34551 | ANGPTL3 | TTTG | GUUUUGGGAGGCUUGAUGGU | 2015 |
| CasM.265466 | PL34552 | ANGPTL3 | TCTG | GGCCCAACCAAAAUUCUCCU | 2016 |
| CasM.265466 | PL34553 | ANGPTL3 | TCTG | UCCAGAGGGUUAUUCAGGUA | 2017 |
| CasM.265466 | PL34554 | APOC3 | TCTG | CUUACGGGCAGAGGCCAGGA | 2018 |
| CasM.265466 | PL34555 | APOC3 | GGTG | CUCUUUCCUCAGGAGCUUCA | 2019 |
| CasM.265466 | PL34556 | APOC3 | AGTG | AUUUAGGGGCUGGGUGACCG | 2020 |
| CasM.265466 | PL34557 | APOC3 | GATG | ACUGAUUUAGGGGCUGGGUG | 2021 |
| CasM.265466 | PL34558 | APOC3 | CATG | CUUCCCCUGACUGAUUUAGG | 2022 |
| CasM.265466 | PL34559 | APOC3 | TCTA | GAGGCAGCUGCUCCAGGUAA | 2023 |
| CasM.265466 | PL34560 | APOC3 | GGTG | CAUGGCACCUCUGUUCCUGC | 2024 |
| CasM.265466 | PL34561 | APOC3 | CCTG | GCGCUCCUGGCCUCUGCCCG | 2025 |
| CasM.265466 | PL34562 | APOC3 | CCTG | AAGCCAUCGGUCACCCAGCC | 2026 |

TABLE 32
Full guide RNAs to be tested

| Intended | Internal | Target | | SEQ |
|---|---|---|---|---|
| Cas* | Ref: | Locus | Full Guide Sequence | ID NO: |
| CasPhi.12 | PL34711 | PCSK9 | AUUGCUCCUUACGAGGAGACACC | 810 |
| | | | CACCUGUGCCGCGGCGA | |
| CasPhi.12 | PL34712 | PCSK9 | AUUGCUCCUUACGAGGAGACCAU | 811 |
| | | | GGGGCCAGGAUCCGUGG | |
| CasPhi.12 | PL34713 | PCSK9 | AUUGCUCCUUACGAGGAGACUGC | 812 |
| | | | AGGCCUUGAAGUUGCCC | |
| CasPhi.12 | PL34714 | PCSK9 | AUUGCUCCUUACGAGGAGACGUC | 813 |
| | | | GAGCAGGCCAGCAAGUG | |
| CasPhi.12 | PL34715 | PCSK9 | AUUGCUCCUUACGAGGAGACCUC | 814 |
| | | | CCAGGCCUGGAGUUUAU | |
| CasPhi.12 | PL34716 | APOC3 | AUUGCUCCUUACGAGGAGACCUU | 815 |
| | | | GCAGGAACAGAGGUGCC | |
| CasPhi.12 | PL34717 | APOC3 | AUUGCUCCUUACGAGGAGACCCU | 816 |
| | | | CAGGAGCUUCAGAGGCC | |
| CasPhi.12 | PL34718 | ANGPTL3 | AUUGCUCCUUACGAGGAGACUAC | 817 |
| | | | UUACUUUAAGUGAAGUU | |
| CasPhi.12 | PL34719 | ANGPTL3 | AUUGCUCCUUACGAGGAGACUAU | 818 |
| | | | CAGCUCAGAAGGACUAG | |
| CasPhi.12 | PL34720 | ANGPTL3 | AUUGCUCCUUACGAGGAGACAUU | 819 |
| | | | CUAGGCAUUCCUGCUGA | |
| CasPhi.12 | PL34722 | PCSK9 | AUUGCUCCUUACGAGGAGACGAA | 820 |
| | | | AGACGGAGGCAGCCUGG | |
| CasM.265466 | PL34563 | PCSK9 | ACAGCUUAUUUGGAAGCUGAAAU | 2027 |
| | | | GUGAGGUUUAUAACACUCACAAG | |
| | | | AAUCCUGAAAAAGGAUGCCAAAC | |
| | | | CUUACUUUAAGUGAAGUUAC | |
| CasM.265466 | PL34564 | PCSK9 | ACAGCUUAUUUGGAAGCUGAAAU | 2028 |
| | | | GUGAGGUUUAUAACACUCACAAG | |
| | | | AAUCCUGAAAAAGGAUGCCAAAC | |
| | | | UUUUCUACUUACUUUAAGUG | |
| CasM.265466 | PL34565 | PCSK9 | ACAGCUUAUUUGGAAGCUGAAAU | 2029 |
| | | | GUGAGGUUUAUAACACUCACAAG | |
| | | | AAUCCUGAAAAAGGAUGCCAAAC | |
| | | | UCCAGACUUUUGUAGAAAAA | |
| CasM.265466 | PL34566 | PCSK9 | ACAGCUUAUUUGGAAGCUGAAAU | 2030 |
| | | | GUGAGGUUUAUAACACUCACAAG | |
| | | | AAUCCUGAAAAAGGAUGCCAAAC | |
| | | | AAAUACUGACUUACCUGAUU | |
| CasM.265466 | PL34567 | PCSK9 | ACAGCUUAUUUGGAAGCUGAAAU | 2031 |
| | | | GUGAGGUUUAUAACACUCACAAG | |
| | | | AAUCCUGAAAAAGGAUGCCAAAC | |
| | | | UCAGCUCAGAAGGACUAGUA | |
| CasM.265466 | PL34568 | PCSK9 | ACAGCUUAUUUGGAAGCUGAAAU | 2032 |
| | | | GUGAGGUUUAUAACACUCACAAG | |
| | | | AAUCCUGAAAAAGGAUGCCAAAC | |
| | | | UCUUACCAUCAUGUUUUACA | |
| CasM.265466 | PL34569 | PCSK9 | ACAGCUUAUUUGGAAGCUGAAAU | 2033 |
| | | | GUGAGGUUUAUAACACUCACAAG | |
| | | | AAUCCUGAAAAAGGAUGCCAAAC | |
| | | | UUGAUUCUAGGCAUUCCUGC | |
| CasM.265466 | PL34570 | PCSK9 | ACAGCUUAUUUGGAAGCUGAAAU | 2034 |
| | | | GUGAGGUUUAUAACACUCACAAG | |
| | | | AAUCCUGAAAAAGGAUGCCAAAC | |
| | | | UUCAGGUAGUCCAUGGACAU | |
| CasM.265466 | PL34571 | PCSK9 | ACAGCUUAUUUGGAAGCUGAAAU | 2035 |
| | | | GUGAGGUUUAUAACACUCACAAG | |
| | | | AAUCCUGAAAAAGGAUGCCAAAC | |
| | | | GUCCCCUUACCAUCAAGCCU | |
| CasM.265466 | PL34572 | PCSK9 | ACAGCUUAUUUGGAAGCUGAAAU | 2036 |
| | | | GUGAGGUUUAUAACACUCACAAG | |
| | | | AAUCCUGAAAAAGGAUGCCAAAC | |
| | | | AAACUUUUCUUUUCAGGAGA | |
| CasM.265466 | PL34573 | PCSK9 | ACAGCUUAUUUGGAAGCUGAAAU | 2037 |
| | | | GUGAGGUUUAUAACACUCACAAG | |
| | | | AAUCCUGAAAAAGGAUGCCAAAC | |
| | | | UCAGAAAAAGAUACCUGAAU | |
| CasM.265466 | PL34574 | PCSK9 | ACAGCUUAUUUGGAAGCUGAAAU | 2038 |
| | | | GUGAGGUUUAUAACACUCACAAG | |
| | | | AAUCCUGAAAAAGGAUGCCAAAC | |
| | | | UCUCCUUUAGGAGGCUGGUG | |
| CasM.265466 | PL34575 | PCSK9 | ACAGCUUAUUUGGAAGCUGAAAU | 2039 |
| | | | GUGAGGUUUAUAACACUCACAAG | |
| | | | AAUCCUGAAAAAGGAUGCCAAAC | |
| | | | UCUUGUUUUUCUACAAAAGU | |
| CasM.265466 | PL34576 | PCSK9 | ACAGCUUAUUUGGAAGCUGAAAU | 2040 |
| | | | GUGAGGUUUAUAACACUCACAAG | |
| | | | AAUCCUGAAAAAGGAUGCCAAAC | |
| | | | AAAGAAAUAGAAAAUCAGGU | |
| CasM.265466 | PL34577 | PCSK9 | ACAGCUUAUUUGGAAGCUGAAAU | 2041 |
| | | | GUGAGGUUUAUAACACUCACAAG | |
| | | | AAUCCUGAAAAAGGAUGCCAAAC | |
| | | | AAUACUAGUCCUUCUGAGCU | |
| CasM.265466 | PL34578 | PCSK9 | ACAGCUUAUUUGGAAGCUGAAAU | 2042 |
| | | | GUGAGGUUUAUAACACUCACAAG | |
| | | | AAUCCUGAAAAAGGAUGCCAAAC | |
| | | | AGAAAUGUAAAACAUGAUGG | |
| CasM.265466 | PL34579 | PCSK9 | ACAGCUUAUUUGGAAGCUGAAAU | 2043 |
| | | | GUGAGGUUUAUAACACUCACAAG | |
| | | | AAUCCUGAAAAAGGAUGCCAAAC | |
| | | | CAUUCAGCAGGAAUGCCUAG | |
| CasM.265466 | PL34580 | PCSK9 | ACAGCUUAUUUGGAAGCUGAAAU | 2044 |
| | | | GUGAGGUUUAUAACACUCACAAG | |
| | | | AAUCCUGAAAAAGGAUGCCAAAC | |
| | | | GUGGUACAUUCAGCAGGAAU | |
| CasM.265466 | PL34581 | PCSK9 | ACAGCUUAUUUGGAAGCUGAAAU | 2045 |
| | | | GUGAGGUUUAUAACACUCACAAG | |
| | | | AAUCCUGAAAAAGGAUGCCAAAC | |
| | | | AAUUAAUGUCCAUGGACUAC | |
| CasM.265466 | PL34582 | PCSK9 | ACAGCUUAUUUGGAAGCUGAAAU | 2046 |
| | | | GUGAGGUUUAUAACACUCACAAG | |
| | | | AAUCCUGAAAAAGGAUGCCAAAC | |
| | | | GUUUUGGGAGGCUUGAUGGU | |
| CasM.265466 | PL34583 | PCSK9 | ACAGCUUAUUUGGAAGCUGAAAU | 2047 |
| | | | GUGAGGUUUAUAACACUCACAAG | |
| | | | AAUCCUGAAAAAGGAUGCCAAAC | |
| | | | GGCCCAACCAAAAUUCUCCU | |
| CasM.265466 | PL34584 | PCSK9 | ACAGCUUAUUUGGAAGCUGAAAU | 2048 |
| | | | GUGAGGUUUAUAACACUCACAAG | |
| | | | AAUCCUGAAAAAGGAUGCCAAAC | |
| | | | UCCAGAGGGUUAUUCAGGUA | |
| CasM.265466 | PL34585 | PCSK9 | ACAGCUUAUUUGGAAGCUGAAAU | 2049 |
| | | | GUGAGGUUUAUAACACUCACAAG | |
| | | | AAUCCUGAAAAAGGAUGCCAAAC | |
| | | | CUUACGGGCAGAGGCCAGGA | |
| CasM.265466 | PL34586 | PCSK9 | ACAGCUUAUUUGGAAGCUGAAAU | 2050 |
| | | | GUGAGGUUUAUAACACUCACAAG | |
| | | | AAUCCUGAAAAAGGAUGCCAAAC | |
| | | | CUCUUUCCUCAGGAGCUUCA | |
| CasM.265466 | PL34587 | PCSK9 | ACAGCUUAUUUGGAAGCUGAAAU | 2051 |
| | | | GUGAGGUUUAUAACACUCACAAG | |
| | | | AAUCCUGAAAAAGGAUGCCAAAC | |
| | | | AUUUAGGGGCUGGGUGACCG | |
| CasM.265466 | PL34588 | PCSK9 | ACAGCUUAUUUGGAAGCUGAAAU | 2052 |
| | | | GUGAGGUUUAUAACACUCACAAG | |
| | | | AAUCCUGAAAAAGGAUGCCAAAC | |
| | | | ACUGAUUUAGGGGCUGGGUG | |
| CasM.265466 | PL34532 | ANGPTL3 | ACAGCUUAUUUGGAAGCUGAAAU | 2053 |
| | | | GUGAGGUUUAUAACACUCACAAG | |
| | | | AAUCCUGAAAAAGGAUGCCAAAC | |
| | | | CUUCCCCUGACUGAUUUAGG | |
| CasM.265466 | PL34533 | ANGPTL3 | ACAGCUUAUUUGGAAGCUGAAAU | 2054 |
| | | | GUGAGGUUUAUAACACUCACAAG | |
| | | | AAUCCUGAAAAAGGAUGCCAAAC | |
| | | | GAGGCAGCUGCUCCAGGUAA | |
| CasM.265466 | PL34534 | ANGPTL3 | ACAGCUUAUUUGGAAGCUGAAAU | 2055 |
| | | | GUGAGGUUUAUAACACUCACAAG | |
| | | | AAUCCUGAAAAAGGAUGCCAAAC | |
| | | | CAUGGCACCUCUGUUCCUGC | |
| CasM.265466 | PL34535 | ANGPTL3 | ACAGCUUAUUUGGAAGCUGAAAU | 2056 |
| | | | GUGAGGUUUAUAACACUCACAAG | |
| | | | AAUCCUGAAAAAGGAUGCCAAAC | |
| | | | GCGCUCCUGGCCUCUGCCCG | |
| CasM.265466 | PL34536 | ANGPTL3 | ACAGCUUAUUUGGAAGCUGAAAU | 2057 |
| | | | GUGAGGUUUAUAACACUCACAAG | |
| | | | AAUCCUGAAAAAGGAUGCCAAAC | |
| | | | AAGCCAUCGGUCACCCAGCC | |
| CasM.265466 | PL34537 | ANGPTL3 | ACAGCUUAUUUGGAAGCUGAAAU | 2058 |
| | | | GUGAGGUUUAUAACACUCACAAG | |
| | | | AAUCCUGAAAAAGGAUGCCAAAC | |
| | | | CACCCGCACCUUGGCGCAGC | |
| CasM.265466 | PL34538 | ANGPTL3 | ACAGCUUAUUUGGAAGCUGAAAU | 2059 |
| | | | GUGAGGUUUAUAACACUCACAAG | |
| | | | AAUCCUGAAAAAGGAUGCCAAAC | |
| | | | GGGCCAGGAUCCGUGGAGGU | |
| CasM.265466 | PL34539 | ANGPTL3 | ACAGCUUAUUUGGAAGCUGAAAU | 2060 |
| | | | GUGAGGUUUAUAACACUCACAAG | |
| | | | AAUCCUGAAAAAGGAUGCCAAAC | |
| | | | GCUCACCAGCUCCAGCAGGU | |
| CasM.265466 | PL34540 | ANGPTL3 | ACAGCUUAUUUGGAAGCUGAAAU | 2061 |
| | | | GUGAGGUUUAUAACACUCACAAG | |
| | | | AAUCCUGAAAAAGGAUGCCAAAC | |
| | | | GCUUCUGCAGGCCUUGAAGU | |
| CasM.265466 | PL34541 | ANGPTL3 | ACAGCUUAUUUGGAAGCUGAAAU | 2062 |
| | | | GUGAGGUUUAUAACACUCACAAG | |
| | | | AAUCCUGAAAAAGGAUGCCAAAC | |
| | | | GGGGUCUUACCGGGGGGCUG | |
| CasM.265466 | PL34542 | ANGPTL3 | ACAGCUUAUUUGGAAGCUGAAAU | 2063 |
| | | | GUGAGGUUUAUAACACUCACAAG | |
| | | | AAUCCUGAAAAAGGAUGCCAAAC | |
| | | | GAAAGACGGAGGCAGCCUGG | |
| CasM.265466 | PL34543 | ANGPTL3 | ACAGCUUAUUUGGAAGCUGAAAU | 2064 |
| | | | GUGAGGUUUAUAACACUCACAAG | |
| | | | AAUCCUGAAAAAGGAUGCCAAAC | |
| | | | CUUACCUGUCUGUGGAAGCG | |
| CasM.265466 | PL34544 | ANGPTL3 | ACAGCUUAUUUGGAAGCUGAAAU | 2065 |
| | | | GUGAGGUUUAUAACACUCACAAG | |
| | | | AAUCCUGAAAAAGGAUGCCAAAC | |
| | | | UUCGUCGAGCAGGCCAGCAA | |
| CasM.265466 | PL34545 | ANGPTL3 | ACAGCUUAUUUGGAAGCUGAAAU | 2066 |
| | | | GUGAGGUUUAUAACACUCACAAG | |
| | | | AAUCCUGAAAAAGGAUGCCAAAC | |
| | | | GGGCCAUCACUUACCUAUGA | |
| CasM.265466 | PL34546 | ANGPTL3 | ACAGCUUAUUUGGAAGCUGAAAU | 2067 |
| | | | GUGAGGUUUAUAACACUCACAAG | |
| | | | AAUCCUGAAAAAGGAUGCCAAAC | |
| | | | UUCCUCCCAGGCCUGGAGUU | |
| CasM.265466 | PL34547 | ANGPTL3 | ACAGCUUAUUUGGAAGCUGAAAU | 2068 |
| | | | GUGAGGUUUAUAACACUCACAAG | |
| | | | AAUCCUGAAAAAGGAUGCCAAAC | |
| | | | AUGACCUGGAAAGGUGAGGA | |
| CasM.265466 | PL34548 | ANGPTL3 | ACAGCUUAUUUGGAAGCUGAAAU | 2069 |
| | | | GUGAGGUUUAUAACACUCACAAG | |
| | | | AAUCCUGAAAAAGGAUGCCAAAC | |
| | | | CACCAGGCAUUGCAGCCAUG | |
| CasM.265466 | PL34549 | ANGPTL3 | ACAGCUUAUUUGGAAGCUGAAAU | 2070 |
| | | | GUGAGGUUUAUAACACUCACAAG | |
| | | | AAUCCUGAAAAAGGAUGCCAAAC | |
| | | | CUUACCUGCCCCAUGGGUGC | |
| CasM.265466 | PL34550 | ANGPTL3 | ACAGCUUAUUUGGAAGCUGAAAU | 2071 |
| | | | GUGAGGUUUAUAACACUCACAAG | |
| | | | AAUCCUGAAAAAGGAUGCCAAAC | |
| | | | CAGUCACCUCCAUGCGCUCG | |
| CasM.265466 | PL34551 | ANGPTL3 | ACAGCUUAUUUGGAAGCUGAAAU | 2072 |
| | | | GUGAGGUUUAUAACACUCACAAG | |
| | | | AAUCCUGAAAAAGGAUGCCAAAC | |
| | | | ACUCUAAGGCCCAAGGGGGC | |
| CasM.265466 | PL34552 | ANGPTL3 | ACAGCUUAUUUGGAAGCUGAAAU | 2073 |
| | | | GUGAGGUUUAUAACACUCACAAG | |
| | | | AAUCCUGAAAAAGGAUGCCAAAC | |
| | | | CCCCAGGCUGCAGCUCCCAC | |
| CasM.265466 | PL34553 | ANGPTL3 | ACAGCUUAUUUGGAAGCUGAAAU | 2074 |
| | | | GUGAGGUUUAUAACACUCACAAG | |
| | | | AAUCCUGAAAAAGGAUGCCAAAC | |
| | | | GCAGGUGACCGUGGCCUGCG | |
| CasM.265466 | PL34554 | APOC3 | ACAGCUUAUUUGGAAGCUGAAAU | 2075 |
| | | | GUGAGGUUUAUAACACUCACAAG | |
| | | | AAUCCUGAAAAAGGAUGCCAAAC | |
| | | | CCUCGCCGCGGCACAGGUGG | |
| CasM.265466 | PL34555 | APOC3 | ACAGCUUAUUUGGAAGCUGAAAU | 2076 |
| | | | GUGAGGUUUAUAACACUCACAAG | |
| | | | AAUCCUGAAAAAGGAUGCCAAAC | |
| | | | CCAGGCAACCUCCACGGAUC | |
| CasM.265466 | PL34556 | APOC3 | ACAGCUUAUUUGGAAGCUGAAAU | 2077 |
| | | | GUGAGGUUUAUAACACUCACAAG | |
| | | | AAUCCUGAAAAAGGAUGCCAAAC | |
| | | | GCGACCUGCUGGAGCUGGUG | |
| CasM.265466 | PL34557 | APOC3 | ACAGCUUAUUUGGAAGCUGAAAU | 2078 |
| | | | GUGAGGUUUAUAACACUCACAAG | |
| | | | AAUCCUGAAAAAGGAUGCCAAAC | |
| | | | AGUGGCGACCUGCUGGAGCU | |
| CasM.265466 | PL34558 | APOC3 | ACAGCUUAUUUGGAAGCUGAAAU | 2079 |
| | | | GUGAGGUUUAUAACACUCACAAG | |
| | | | AAUCCUGAAAAAGGAUGCCAAAC | |
| | | | ACUGUCACACUUGCUGGCCU | |
| CasM.265466 | PL34559 | APOC3 | ACAGCUUAUUUGGAAGCUGAAAU | 2080 |
| | | | GUGAGGUUUAUAACACUCACAAG | |
| | | | AAUCCUGAAAAAGGAUGCCAAAC | |
| | | | CUCCCCAGCCUCAGCUCCCG | |
| CasM.265466 | PL34560 | APOC3 | ACAGCUUAUUUGGAAGCUGAAAU | 2081 |
| | | | GUGAGGUUUAUAACACUCACAAG | |
| | | | AAUCCUGAAAAAGGAUGCCAAAC | |
| | | | GCCCCAACUGUGAUGACCUG | |
| CasM.265466 | PL34561 | APOC3 | ACAGCUUAUUUGGAAGCUGAAAU | 2082 |
| | | | GUGAGGUUUAUAACACUCACAAG | |
| | | | AAUCCUGAAAAAGGAUGCCAAAC | |
| | | | CCCCCCAGCACCCAUGGGGC | |
| CasM.265466 | PL34562 | APOC3 | ACAGCUUAUUUGGAAGCUGAAAU | 2083 |
| | | | GUGAGGUUUAUAACACUCACAAG | |
| | | | AAUCCUGAAAAAGGAUGCCAAAC | |
| | | | CAAAACAGCUGCCAACCUGC | |

[0932] Cells are harvested 48-72 hours after transfection. Base editing was analyzed by NGS.

### Example 10. CasM.265466 and CasPhi.12 Variants Reduce Expression of Human APOC3 and Triglycerides in Humanized APOC3 Mice with Severe Plasma Hypertriglyceridemia and Hypercholesterolemia

[0933] Humanized APOC3 (hAPOC3) mice with severe plasma hypertriglyceridemia and significantly increased plasma cholesterol (B6;CBA-Tg(APOC3)3707Bres/J), eight weeks of age were dosed at 10 mL/kg based on the mean body weight with a single IV bolus via tail vein with AAV8 encoding (1) either CasM.265466 variant D220R or CasPhi.12 variant L26R; and (2) an APOC3 guide RNA. Samples were collected from mice at 2 and 4 weeks. Guide RNA sequences are provided in TABLE 33 below.

TABLE 33
Human APOC3 Guide RNAs tested
in humanized APOC3 mice

| Guide | Guide RNA Nucleotide |
|---|---|
| RNA ID | Sequence* |
| R15592 | auagauugcuccuuacgaggagacAGGGAACU |
| | GAAGCCAUC |
| | (SEQ ID NO: 23) |
| R15595 | auagauugcuccuuacgaggagacCAGGGAA |
| | CUGAAGCCAU |
| | (SEQ ID NO: 26) |
| R16927 | acagcuuauuuggaagcugaaaugugagguu |
| | uauaacacucacaagaauccugaaaaaggau |
| | gccaaacAGUUCUGGGAUUUGGACCCU |
| | (SEQ ID NO: 826) |
| R16928 | acagcuuauuuggaagcugaaaugugagguu |
| | uauaacacucacaagaauccugaaaaaggau |
| | gccaaacGACCCUGAGGUCAGACCAAC |
| | (SEQ ID NO: 827) |
| R16929 | acagcuuauuuggaagcugaaaugugagguu |
| | uauaacacucacaagaauccugaaaaaggau |
| | gccaaacACCUCAGGGUCCAAAUCCCA |
| | (SEQ ID NO: 828) |

*Spacer sequence is capitalized.

[0934] Levels of human APOC3 protein in liver were quantified by ELISA. CasM.265466 variant D220R and multiple APOC3 guide RNAs tested reduced human ApoC3 protein in liver at 2 weeks and 4 weeks. CasM.265466 variant D220R demonstrated 90% reduction of hAPOC3 in liver at 4 weeks. CasPhi.12 variant L26R demonstrated 70% reduction of hAPOC3 in liver at 4 weeks. C57/B6 mice did not produce any human ApoC3 with the AAV8-265466 D220R PCSK9 vehicle that was used as a positive control. See FIG. 11. Liver and body weights were normal at 0, 2 and 4 weeks. At four weeks post injection ALT levels were reduced in mice that received CasM.265466 variant D220R or CasPhi.12 variant L26R when compared those of mice receiving vehicle only. At four weeks post injection the amount of serum triglycerides in the CasM.265466 variant D220R and CasPhi.12 variant L26R treated mice are significantly reduced when compared to the vehicle group. See TABLE 34 below and FIG. 12. The guide IDs shown in the legend from top to bottom correspond to the data points in the graphs from left to right.

TABLE 34
Serum Triglycerides in hAPOC3 Mice with Severe Hypertriglyceridemia

| Treatment | Mean +/− SD Triglycerides (mg/dL) |
|---|---|
| PBS-Vehicle | 936 ± 167 |
| AAV8- PL30135 (CasPhi.12 L26R, R15592) | 583 ± 108 |
| AAV8- PL30134 (CasPhi.12 L26R, R15595) | 444 ± 141 |
| AAV8- PL34517 (CasM.265466 D220R, R16927) | 145 ± 13 |
| AAV8- PL34518 (CasM.265466 D220R, R16928) | 190 ± 34 |
| AAV8- PL34519 (CasM.265466 D220R, R16929) | 247 ± 51 |

### Example 11. Epigenetic Modification of APOC3 in Mammalian Cells with CasPhi.12 and CasM.265466

[0935] Briefly, mammalian cells are transfected with plasmids encoding a fusion protein and a guide nucleic acid. Cells are harvested 48 or 72 hours later for analysis. The mammalian cells to be used include Mammalian (Macaca fascicularis) skin fibroblasts (CYNOM-K1 Cells), HepG2 cells, and primary cynomolgus hepatocytes. The methylation status of the APOC3 gene promoter and the expression of APOC gene will be analyzed.

[0936] The following CasPhi12-based fusion protein constructs are tested for the repression of APOC3 expression: CasPhi12 or its engineered variant fused with DNMT3A and DNMT3L; CasPhi12 or its engineered variant fused with DNMT3L; CasPhi12 or its engineered variant fused with DNMT3A, DNMT3L, and KRAB; CasPhi12 or its engineered variant fused with DNMT3L and KRAB; and CasPhi12 or its engineered variant fused with KRAB. The guide nucleic acid to be tested in combination with a CasPhi12-based fusion protein is selected from the sequences of SEQ ID NOs: 1400-1569.

[0937] The CasM.265466-based fusion protein constructs are tested for the repression of APOC3 expression: CasM.265466 or its engineered variant fused with DNMT3A and DNMT3L;CasM.265466 or its engineered variant fused with DNMT3L; CasM.265466 or its engineered variant fused with DNMT3A, DNMT3L, and KRAB; CasM.265466 or its engineered variant fused with DNMT3L and KRAB; and CasM.265466 or its engineered variant fused with KRAB. The guide nucleic acid to be tested in combination with a CasM.265466-based fusion protein is selected from the sequences of SEQ ID NOs: 494-584, 826-828, 1570-1969, 2075-2083, and 2087-2089.

### Example 12. CasPhi.12 Variant Reduces Expression of Human APOC3 and Triglycerides in Humanized APOC3 Mice with Severe Plasma Hypertriglyceridemia and Hypercholesterolemia

[0938] Humanized APOC3 mice with severe plasma hypertriglyceridemia and significantly increased plasma cholesterol (B6;CBA-Tg(APOC3)3707Bres/J), eight weeks of age were dosed at 2 mg/kg based on the mean body weight with a single IV bolus via tail vein with an LNP encoding (1) CasPhi.12 variant L26R/I471T (SEQ ID NO: 2090); and (2) an APOC3 guide RNA (or a PCSK9 guide RNA as a control). Samples were collected from mice at 4 and 7 weeks. Guide RNA sequences are provided in TABLE 35 below.

TABLE 35
Human APOC3 and PCSK9 Guide RNAs
tested in humanized APOC3 mice

| Guide | |
|---|---|
| RNA ID | Guide RNA Nucleotide Sequence* |
| R8860 | mA*mU*mA*GAUUGCUCCUUACGAGGAGA |
| | CGAGCAACGGCGGAAmG* |
| | mG*mU (SEQ ID NO: 493) |
| R15592 | auagauugcuccuuacgaggagacAGGGA |
| | ACUGAAGCCAUC (SEQ ID NO: 23) |
| R15595 | auagauugcuccuuacgaggagacCAGGG |
| | AACUGAAGCCAU (SEQ ID NO: 26) |
| R15586 | auagauugcuccuuacgaggagacUCCUU |
| | AACGGUGCUCCA (SEQ ID NO: 17) |
| R15596 | auagauugcuccuuacgaggagacCCUGA |
| | AAGACUACUGGA (SEQ ID NO: 27) |
| R17563 | auagauugcuccuuacgaggagacCUUGC |
| | AGGAACAGAGGC (SEQ ID NO: 75) |
| R17566 | auagauugcuccuuacgaggagacCUCAG |
| | GAGCUUCAGAGG (SEQ ID NO: 77) |

*Spacer sequence is capitalized.

[0939] Levels of human APOC3 protein in liver were quantified by ELISA. CasPhi.12 variant L26R/I471T demonstrated up to about 80% reduction of hAPOC3 in liver at 7 weeks. See FIG. 13. The percent indel formation in mice varied with the guide RNA, with R15595, R15596, and R17566 having at least 10% indel formation efficiency in the liver at 7 weeks. See TABLE 36 below.

TABLE 36
Percent Indel Formation in Humanized APOC3 Mouse Liver

| Treatment | Mean +/− SD % Indels |
|---|---|
| PBS-Vehicle | |
| LNP- CasPhi.12 L26R/I471T- R8860 | 47.5 ± 2.1% |
| LNP- CasPhi.12 L26R/I471T- R15595 | 17.5 ± 5.4% |
| LNP- CasPhi.12 L26R/I471T- R15586 | 0.3 ± 0.1% |
| LNP- CasPhi.12 L26R/I471T- R15592 | 1.7 ± 0.5% |
| LNP- CasPhi.12 L26R/I471T- R15596 | 7.1 ± 3.2% |
| LNP- CasPhi.12 L26R/I471T- R17563 | 0.9 ± 0.7% |
| LNP- CasPhi.12 L26R/I471T- R17566 | 18.1 ± 8.7% |

[0940] Body weights and % liver weights/body weights were normal at 0 and 4 weeks. At four weeks post injection ALT levels were reduced in mice that received CasPhi.12 variant L26R/I471T when compared those of mice receiving vehicle only. At four weeks post injection the amount of serum triglycerides in the CasPhi.12 variant L26R/I471T treated mice are significantly reduced when compared to the vehicle group. At four weeks post injection the amount of LDL cholesterol and total cholesterol in the CasPhi.12 variant L26R/I471T treated mice are significantly reduced when compared to the vehicle group. See TABLE 37 below and FIG. 14A-FIG. 14D. The guide IDs shown in the legend from top to bottom correspond to the data points in the graphs from left to right.

TABLE 37
Serum Triglycerides in hAPOC3 Mice
with Severe Hypertriglyceridemia

| Treatment | Average Triglycerides (mg/dL) |
|---|---|
| PBS-Vehicle | 7473 |
| LNP- CasPhi.12 L26R/I471T- R15595 | 530 |
| LNP- CasPhi.12 L26R/I471T- R15596 | 587 |
| LNP- CasPhi.12 L26R/I471T- R17566 | 383 |

### Example 13. Non-Human Primate (NHP) Testing of LNP Formulations

[0941] LNP formulations of the present disclosure can be used for in vivo editing in non-human primates (NHP), such as male cynomolgus macaques, using mRNA encoding various effector protein variants, and associated PCSK9 and APOC3 guide nucleic acid.

[0942] mRNA encoding effector variants such as a L26R, I471T variant (see SEQ ID NO: 2090 and SEQ ID NO: 2092, as shown in TABLE 20 and TABLE 40) are combined with guide RNA (as shown in TABLE 41) and formulated by encapsulating the payload (i.e., nuclease mRNA and gRNA) in LNP formulations as described in the present application.

[0943] The payloads are provided in four samples, as shown in TABLE 38 below, where nuclease mRNA A and C contain N1-methylpseudouridine bases, and guide RNA A1 is modified with phosphorothioate backbone and 2′-O-methyl groups, and guide RNA C1, C2, and C3 are 5′- and 3′-end modified with phosphorothioate backbone and 2′-O-methyl groups. All RNA (nuclease RNA or guide RNA) are provided separately and are frozen in H₂O.

TABLE 38
Exemplary Payloads for use in a Non-Human Primate Test

| Payload | Nuclease mRNA | Guide RNA |
|---|---|---|
| Payload | Nuclease mRNA A: 14 mg (frozen in | Guide A1: 14 mg (frozen in H₂O) |
| A/A1 | H₂O) | |
| Payload | Nuclease mRNA C: 30 mg (frozen in | Guide C1: 30 mg (frozen in H₂O) |
| C/C1 | H₂O) | |
| Payload | | Guide C2: 30 mg (frozen in H₂O) |
| C/C2 | | |
| Payload | | Guide C3: 30 mg (frozen in H₂O) |

C/C3

[0944] Four formulations with two nuclease mRNA and four guide RNA, are provided at 1.0 mg/ml frozen aliquots as Nuclease mRNA:Guide RNA, mass to mass ratio of 1:1 for payload A/A1 and 1:3 for payloads C/C1, C/C2, and C/C3, as shown in TABLE 39, below.

TABLE 39
Exemplary Formulations for use in a Non-Human Primate Test

| | | | Nuclease | | |
|---|---|---|---|---|---|
| | | | mRNA:guide | | |
| | Nuclease | Guide | RNA | | |
| Formulation | mRNA | RNA | ratio | Concentration | Aliquots & volume |
| Vehicle | Vehicle | n/a | n/a | n/a | 16 × 50 ml & |
| | | | | | 12 × 5 ml |
| LNP | Nuclease | Guide | 1:1 | 1 mg/ml | 2 × 8 ml & |
| formulation | mRNA | A1 | | | 6 × 0.5 ml |
| A/A1 | A | | | | |
| LNP | Nuclease | Guide | 1:3 | 1 mg/ml | 3 × 8 ml & |
| formulation | mRNA | C1 | | | 6 × 0.5 ml |
| C/C1 | C | | | | |
| LNP | Nuclease | Guide | 1:3 | 1 mg/ml | 3 × 8 ml & |
| formulation | mRNA | C2 | | | 6 × 0.5 ml |
| C/C2 | C | | | | |
| LNP | Nuclease | Guide | 1:3 | 1 mg/ml | 3 × 8 ml & |
| formulation | mRNA | C3 | | | 6 × 0.5 ml |
| C/C3 | C | | | | |

[0945] The efficacy and tolerability of the mRNA and guide RNA discloses herein and using the LNP formulations disclosed herein are assessed to target the liver. The formulations are tested in male cynomolgus macaques (non-human primates) as described below.
[0946] Animal info: male cynomolgus macaques, Cambodian origin, age=approximately 2-3 years of age.
[0947] Drug product administration: 60 minute IV infusion via Cephalic vein.
[0948] Dose volume: 10 ml/kg (weights obtained prior to dosing).
[0949] Premedication prior to drug product administration:
   [0950] Anti-inflammatory pretreatment administered IM on day 1 and 30-60 minutes prior to dose administration:
      [0951] 1.0 mg/kg of dexamethasone (corticosteroid, anti-inflammatory)
      [0952] 0.5 mg/kg of famotidine (histamine-2 Rc antagonist, antacid)
      [0953] 5.0 mg/kg of diphenhydramine (antihistamine)
[0954] Formulations and vehicle are IV infused as follows:
   [0955] Vehicle: volume equivalent to 2 mg/kg dose (n=1)
   [0956] LNP formulation A/A1: 2 mg/kg (n=2)
   [0957] LNP formulation C/C1: 2 mg/kg (n=3)
   [0958] LNP formulation C/C2: 2 mg/kg (n=3)
   [0959] LNP formulation C/C3: 2 mg/kg (n=3)
[0960] Animals are sacrificed 14 days after IV infusion and the following tissue samples are snap frozen by liquid nitrogen and stored at −80° C.:
   [0961] Liver tissue samples are collected; and
   [0962] Additional tissue samples are collected, but may not be analyzed: heart, lungs, kidneys, spleen, pancreas, adrenals, brain, bone marrow, testes, GI, various muscles, and lymph nodes.
[0963] Indels from the collected tissue samples are determined by NGS.

[0964] As a quality control tool for screening drug substances and quality control for drug products administered to non-human primates, genetically engineered mouse models (i.e., knock-in of the human gene of interest) and humanized liver (transplantation of human hepatocytes) are evaluated. The formulated drugs are tested in vivo in two separate humanized mouse models as follows:
[0965] Intravenous administration (to 10 animals each, 5 mice per animal models)
   [0966] Vehicle: volume equivalent to 2 mg/kg dose (n=3)
   [0967] LNP formulation A/A1: 2 mg/kg (n=5)
   [0968] LNP formulation C/C1: 2 mg/kg (n=5)
   [0969] LNP formulation C/C2: 2 mg/kg (n=5)
   [0970] LNP formulation C/C3: 2 mg/kg (n=5)
[0971] Liver is collected 5-7 days post-administration, and indels are determined by NGS.
[0972] Optionally, lung, spleen, kidney, adrenal gland, gonads, and brain tissue are collected 5-7 days post-administration, and indels are determined by NGS.
[0973] 2 independent repeats of the study with some overage are conducted, and one study and an independent repeat are conducted if there are technical challenges.
[0974] A 30 mg mouse, dose volume of 10 ml/kg dose volume is estimated.
[0975] A 50% overage for formulation is assumed.

[0976] Moreover, the formulated drugs are tested in two cell lines (in HepG2 cells and primary primate hepatocytes) at various doses. The cells are transfected in the presence of ApoE as follows:
[0977] Transfection of cells with formulated drugs and doses as shown below:
   [0978] LNP formulation A/A1: 100, 200, 400 mg/well (n=5)
   [0979] LNP formulation C/C1: 100, 200, 400 mg/well (n=5)
   [0980] LNP formulation C/C2: 100, 200, 400 mg/well (n=5)
   [0981] LNP formulation C/C3: 100, 200, 400 mg/well (n=5)
[0982] 2 independent repeats of the study with some overage are conducted, and one study and an independent repeat are conducted if there are technical challenges.
[0983] Cells are harvested 72 hours post-transfection and indels are determined by NGS.

[0984] The amino acid sequence of the protein that the above mRNA sequence codes for (CasPhi.12 L26R, 1471T) is shown in TABLE 40 below (NLSs underlined):

TABLE 40
Exemplary Protein Sequence

Protein Sequence
MAPKKKRKVGIHGVPAAIKPTVSQFLTPGFKLIRNHSRTAGRKLK
NEGEEACKKFVRENEIPKDECPNFQGGPAIANIIAKSREFTEWEI
YQSSLAIQEVIFTLPKDKLPEPILKEEWRAQWLSEHGLDTVPYKE
AAGLNLIIKNAVNTYKGVQVKVDNKNKNNLAKINRKNEIAKLNGE
QEISFEEIKAFDDKGYLLQKPSPNKSIYCYQSVSPKPFITSKYHN
VNLPEEYIGYYRKSNEPIVSPYQFDRLRIPIGEPGYVPKWQYTFL
SKKENKRRKLSKRIKNVSPILGIICIKKDWCVFDMRGLLRTNHWK
KYHKPTDSINDLFDYFTGDPVIDTKANVVRFRYKMENGIVNYKPV
REKKGKELLENICDQNGSCKLATVDVGQNNPVAIGLFELKKVNGE
LTKTLISRHPTPIDFCNKITAYRERYDKLESSIKLDAIKQLTSEQ
KIEVDNYNNNFTPQNTKQIVCSKLNINPNDLPWDKMTSGTHFISE
KAQVSNKSEIYFTSTDKGKTKDVMKSDYKWFQDYKPKLSKEVRDA
LSDIEWRLRRESLEFNKLSKSREQDARQLANWISSMCDVIGIENL
VKKNNFFGGSGKREPGWDNFYKPKKENRWWINAIHKALTELSQNK
GKRVILLPAMRTSITCPKCKYCDSKNRNGEKFNCLKCGIELNADI
DVATENLATVAITAQSMPKPTCERSGDAKKPVRARKAKAPEFHDK
LAPSYTVVLREAVKRPAATKKAGQAKKKK
(SEQ ID NO: 2093)

[0985] The guides that may be used in an NHP study as described above are shown in TABLE 41 below, with the spacer underlined:

TABLE 41
Exemplary Guide RNA for use in a
Non-Human Primate Test

| Guide | | |
|---|---|---|
| ID | Target | Sequence |
| R14051 | PCSK9 | SEQ ID NO: 144 |
| | | AUAGAUUGCUCCUUACGAGGA |
| | | GACGCGCAGCGGUGGAAGGU |
| R15595 | APOC3 | SEQ ID NO: 26 |
| | | AUAGAUUGCUCCUUACGAGGA |
| | | GACCAGGGAACUGAAGCCAU |
| R17566 | APOC3 | SEQ ID NO: 77 |
| | | AUAGAUUGCUCCUUACGAGGA |
| | | GACCUCAGGAGCUUCAGAGG |

The application's sequence listing, which the Patent Office published only in electronic form, follows.

SEQUENCE LISTING (2093 sequences)

SEQ ID NO: 1 - DNA, 17 bp, synthetic construct
  source 1..17: mol_type = other DNA
tccttaacggtgctcca

SEQ ID NO: 2 - DNA, 17 bp, synthetic construct
  source 1..17: mol_type = other DNA
acggtgctccagtagtc

SEQ ID NO: 3 - DNA, 17 bp, synthetic construct
  source 1..17: mol_type = other DNA
aagcaacctacaggggc

SEQ ID NO: 4 - DNA, 17 bp, synthetic construct
  source 1..17: mol_type = other DNA
tccagctttattgggag

SEQ ID NO: 5 - DNA, 17 bp, synthetic construct
  source 1..17: mol_type = other DNA
gggtattgaggtctcag

SEQ ID NO: 6 - DNA, 17 bp, synthetic construct
  source 1..17: mol_type = other DNA
agcaacctacaggggca

SEQ ID NO: 7 - DNA, 17 bp, synthetic construct
  source 1..17: mol_type = other DNA
agggaactgaagccatc

SEQ ID NO: 8 - DNA, 17 bp, synthetic construct
  source 1..17: mol_type = other DNA
taagcaacctacagggg

SEQ ID NO: 9 - DNA, 17 bp, synthetic construct
  source 1..17: mol_type = other DNA
ttgtccagctttattgg

SEQ ID NO: 10 - DNA, 17 bp, synthetic construct
  source 1..17: mol_type = other DNA
cagggaactgaagccat

SEQ ID NO: 11 - DNA, 17 bp, synthetic construct
  source 1..17: mol_type = other DNA
cctgaaagactactgga

SEQ ID NO: 12 - DNA, 17 bp, synthetic construct
  source 1..17: mol_type = other DNA
aaagggacagtattctc

SEQ ID NO: 13 - DNA, 17 bp, synthetic construct
  source 1..17: mol_type = other DNA
cttaaaagggacagtat

SEQ ID NO: 14 - DNA, 17 bp, synthetic construct
  source 1..17: mol_type = other DNA
agttccctgaaagacta

SEQ ID NO: 15 - DNA, 17 bp, synthetic construct
  source 1..17: mol_type = other DNA
atccctagaggcagctg

SEQ ID NO: 16 - DNA, 24 bp, synthetic construct
  source 1..24: mol_type = other DNA
gtagattgctccttacgaggagac

SEQ ID NO: 17 - DNA, 41 bp, synthetic construct
  source 1..41: mol_type = other DNA
atagattgctccttacgaggagactccttaacggtgctcca

SEQ ID NO: 18 - DNA, 41 bp, synthetic construct
  source 1..41: mol_type = other DNA
atagattgctccttacgaggagacacggtgctccagtagtc

SEQ ID NO: 19 - DNA, 41 bp, synthetic construct
  source 1..41: mol_type = other DNA
atagattgctccttacgaggagacaagcaacctacaggggc

SEQ ID NO: 20 - DNA, 41 bp, synthetic construct
  source 1..41: mol_type = other DNA
atagattgctccttacgaggagactccagctttattgggag

SEQ ID NO: 21 - DNA, 41 bp, synthetic construct
  source 1..41: mol_type = other DNA
atagattgctccttacgaggagacgggtattgaggtctcag

SEQ ID NO: 22 - DNA, 41 bp, synthetic construct
  source 1..41: mol_type = other DNA
atagattgctccttacgaggagacagcaacctacaggggca

SEQ ID NO: 23 - DNA, 41 bp, synthetic construct
  source 1..41: mol_type = other DNA
atagattgctccttacgaggagacagggaactgaagccatc

SEQ ID NO: 24 - DNA, 41 bp, synthetic construct
  source 1..41: mol_type = other DNA
atagattgctccttacgaggagactaagcaacctacagggg

SEQ ID NO: 25 - DNA, 41 bp, synthetic construct
  source 1..41: mol_type = other DNA
atagattgctccttacgaggagacttgtccagctttattgg

SEQ ID NO: 26 - DNA, 41 bp, synthetic construct
  source 1..41: mol_type = other DNA
atagattgctccttacgaggagaccagggaactgaagccat

SEQ ID NO: 27 - DNA, 41 bp, synthetic construct
  source 1..41: mol_type = other DNA
atagattgctccttacgaggagaccctgaaagactactgga

SEQ ID NO: 28 - DNA, 41 bp, synthetic construct
  source 1..41: mol_type = other DNA
atagattgctccttacgaggagacaaagggacagtattctc

SEQ ID NO: 29 - DNA, 41 bp, synthetic construct
  source 1..41: mol_type = other DNA
atagattgctccttacgaggagaccttaaaagggacagtat

SEQ ID NO: 30 - DNA, 41 bp, synthetic construct
  source 1..41: mol_type = other DNA
atagattgctccttacgaggagacagttccctgaaagacta

SEQ ID NO: 31 - DNA, 41 bp, synthetic construct
  source 1..41: mol_type = other DNA
atagattgctccttacgaggagacatccctagaggcagctg

SEQ ID NO: 32 - protein, 717 aa, unidentified
MIKPTVSQFLTPGFKLIRNHSRTAGLKLKNEGEEACKKFVRENEIPKDECPNFQGGPAIANIIAKSREFTEWEIYQSSLAIQEVIFTLPKDKLPEPILKEEWRAQWLSEHGLDTVPYKEAAGLNLIIKNAVNTYKGVQVKVDNKNKNNLAKINRKNEIAKLNGEQEISFEEIKAFDDKGYLLQKPSPNKSIYCYQSVSPKPFITSKYHNVNLPEEYIGYYRKSNEPIVSPYQFDRLRIPIGEPGYVPKWQYTFLSKKENKRRKLSKRIKNVSPILGIICIKKDWCVFDMRGLLRTNHWKKYHKPTDSINDLFDYFTGDPVIDTKANVVRFRYKMENGIVNYKPVREKKGKELLENICDQNGSCKLATVDVGQNNPVAIGLFELKKVNGELTKTLISRHPTPIDFCNKITAYRERYDKLESSIKLDAIKQLTSEQKIEVDNYNNNFTPQNTKQIVCSKLNINPNDLPWDKMISGTHFISEKAQVSNKSEIYFTSTDKGKTKDVMKSDYKWFQDYKPKLSKEVRDALSDIEWRLRRESLEFNKLSKSREQDARQLANWISSMCDVIGIENLVKKNNFFGGSGKREPGWDNFYKPKKENRWWINAIHKALTELSQNKGKRVILLPAMRTSITCPKCKYCDSKNRNGEKFNCLKCGIELNADIDVATENLATVAITAQSMPKPTCERSGDAKKPVRARKAKAPEFHDKLAPSYTVVLREAV

SEQ ID NO: 33 - protein, 748 aa, synthetic construct
PKKKRKVGIHGVPAAMIKPTVSQFLTPGFKLIRNHSRTAGLKLKNEGEEACKKFVRENEIPKDECPNFQGGPAIANIIAKSREFTEWEIYQSSLAIQEVIFTLPKDKLPEPILKEEWRAQWLSEHGLDTVPYKEAAGLNLIIKNAVNTYKGVQVKVDNKNKNNLAKINRKNEIAKLNGEQEISFEEIKAFDDKGYLLQKPSPNKSIYCYQSVSPKPFITSKYHNVNLPEEYIGYYRKSNEPIVSPYQFDRLRIPIGEPGYVPKWQYTFLSKKENKRRKLSKRIKNVSPILGIICIKKDWCVFDMRGLLRTNHWKKYHKPTDSINDLFDYFTGDPVIDTKANVVRFRYKMENGIVNYKPVREKKGKELLENICDQNGSCKLATVDVGQNNPVAIGLFELKKVNGELTKTLISRHPTPIDFCNKITAYRERYDKLESSIKLDAIKQLTSEQKIEVDNYNNNFTPQNTKQIVCSKLNINPNDLPWDKMISGTHFISEKAQVSNKSEIYFTSTDKGKTKDVMKSDYKWFQDYKPKLSKEVRDALSDIEWRLRRESLEFNKLSKSREQDARQLANWISSMCDVIGIENLVKKNNFFGGSGKREPGWDNFYKPKKENRWWINAIHKALTELSQNKGKRVILLPAMRTSITCPKCKYCDSKNRNGEKFNCLKCGIELNADIDVATENLATVAITAQSMPKPTCERSGDAKKPVRARKAKAPEFHDKLAPSYTVVLREAVKRPAATKKAGQAKKKK

SEQ ID NO: 34 - protein, 717 aa, synthetic construct
MIKPTVSQFLTPGFKLIRNHSRTAGRKLKNEGEEACKKFVRENEIPKDECPNFQGGPAIANIIAKSREFTEWEIYQSSLAIQEVIFTLPKDKLPEPILKEEWRAQWLSEHGLDTVPYKEAAGLNLIIKNAVNTYKGVQVKVDNKNKNNLAKINRKNEIAKLNGEQEISFEEIKAFDDKGYLLQKPSPNKSIYCYQSVSPKPFITSKYHNVNLPEEYIGYYRKSNEPIVSPYQFDRLRIPIGEPGYVPKWQYTFLSKKENKRRKLSKRIKNVSPILGIICIKKDWCVFDMRGLLRTNHWKKYHKPTDSINDLFDYFTGDPVIDTKANVVRFRYKMENGIVNYKPVREKKGKELLENICDQNGSCKLATVDVGQNNPVAIGLFELKKVNGELTKTLISRHPTPIDFCNKITAYRERYDKLESSIKLDAIKQLTSEQKIEVDNYNNNFTPQNTKQIVCSKLNINPNDLPWDKMISGTHFISEKAQVSNKSEIYFTSTDKGKTKDVMKSDYKWFQDYKPKLSKEVRDALSDIEWRLRRESLEFNKLSKSREQDARQLANWISSMCDVIGIENLVKKNNFFGGSGKREPGWDNFYKPKKENRWWINAIHKALTELSQNKGKRVILLPAMRTSITCPKCKYCDSKNRNGEKFNCLKCGIELNADIDVATENLATVAITAQSMPKPTCERSGDAKKPVRARKAKAPEFHDKLAPSYTVVLREAV

SEQ ID NO: 35 - protein, 744 aa, synthetic construct
MIKPTVSQFLTPGFKLIRNHSRTAGRKLKNEGEEACKKFVRENEIPKDECPNFQGGPAIANIIAKSREFTEWEIYQSSLAIQEVIFTLPKDKLPEPILKEEWRAQWLSEHGLDTVPYKEAAGLNLIIKNAVNTYKGVQVKVDNKNKNNLAKINRKNEIAKLNGEQEISFEEIKAFDDKGYLLQKPSPNKSIYCYQSVSPKPFITSKYHNVNLPEEYIGYYRKSNEPIVSPYQFDRLRIPIGEPGYVPKWQYTFLSKKENKRRKLSKRIKNVSPILGIICIKKDWCVFDMRGLLRTNHWKKYHKPTDSINDLFDYFTGDPVIDTKANVVRFRYKMENGIVNYKPVREKKGKELLENICDQNGSCKLATVDVGQNNPVAIGLFELKKVNGELTKTLISRHPTPIDFCNKITAYRERYDKLESSIKLDAIKQLTSEQKIEVDNYNNNFTPQNTKQIVCSKLNINPNDLPWDKMISGTHFISEKAQVSNKSEIYFTSTDKGKTKDVMKSDYKWFQDYKPKLSKEVRDALSDIEWRLRRESLEFNKLSKSREQDARQLANWISSMCDVIGIENLVKKNNFFGGSGKREPGWDNFYKPKKENRWWINAIHKALTELSQNKGKRVILLPAMRTSITCPKCKYCDSKNRNGEKFNCLKCGIELNADIDVATENLATVAITAQSMPKPTCERSGDAKKPVRARKAKAPEFHDKLAPSYTVVLREAVKGRRPRKRPARQKRKRNSAVERAEEVC

SEQ ID NO: 36 - protein, 17 aa, synthetic construct
  REGION 1..15: note = Nuclear localization signal 1
MAPKKKRKVGIHGVPAA

SEQ ID NO: 37 - protein, 16 aa, synthetic construct
  REGION 1..16: note = Nuclear localization signal 2
KRPAATKKAGQAKKKK

SEQ ID NO: 38 - RNA, 36 nt, synthetic construct
  source 1..36: mol_type = other RNA
ctttcaagactaatagattgctccttacgaggagac

SEQ ID NO: 39 - RNA, 24 nt, synthetic construct
  source 1..24: mol_type = other RNA
atagattgctccttacgaggagac

SEQ ID NO: 40 - RNA, 23 nt, synthetic construct
  source 1..23: mol_type = other RNA
tagattgctccttacgaggagac

SEQ ID NO: 41 - RNA, 22 nt, synthetic construct
  source 1..22: mol_type = other RNA
agattgctccttacgaggagac

SEQ ID NO: 42 - RNA, 21 nt, synthetic construct
  source 1..21: mol_type = other RNA
gattgctccttacgaggagac

SEQ ID NO: 43 - RNA, 20 nt, synthetic construct
  source 1..20: mol_type = other RNA
attgctccttacgaggagac

SEQ ID NO: 44 - protein, 4 aa, synthetic construct
GAAA

SEQ ID NO: 45 - protein, 717 aa, synthetic construct
  REGION 1..717: note = CasPhi.12 E567A
MIKPTVSQFLTPGFKLIRNHSRTAGLKLKNEGEEACKKFVRENEIPKDECPNFQGGPAIANIIAKSREFTEWEIYQSSLAIQEVIFTLPKDKLPEPILKEEWRAQWLSEHGLDTVPYKEAAGLNLIIKNAVNTYKGVQVKVDNKNKNNLAKINRKNEIAKLNGEQEISFEEIKAFDDKGYLLQKPSPNKSIYCYQSVSPKPFITSKYHNVNLPEEYIGYYRKSNEPIVSPYQFDRLRIPIGEPGYVPKWQYTFLSKKENKRRKLSKRIKNVSPILGIICIKKDWCVFDMRGLLRTNHWKKYHKPTDSINDLFDYFTGDPVIDTKANVVRFRYKMENGIVNYKPVREKKGKELLENICDQNGSCKLATVDVGQNNPVAIGLFELKKVNGELTKTLISRHPTPIDFCNKITAYRERYDKLESSIKLDAIKQLTSEQKIEVDNYNNNFTPQNTKQIVCSKLNINPNDLPWDKMISGTHFISEKAQVSNKSEIYFTSTDKGKTKDVMKSDYKWFQDYKPKLSKEVRDALSDIEWRLRRESLEFNKLSKSREQDARQLANWISSMCDVIGIANLVKKNNFFGGSGKREPGWDNFYKPKKENRWWINAIHKALTELSQNKGKRVILLPAMRTSITCPKCKYCDSKNRNGEKFNCLKCGIELNADIDVATENLATVAITAQSMPKPTCERSGDAKKPVRARKAKAPEFHDKLAPSYTVVLREAV

SEQ ID NO: 46 - protein, 717 aa, unidentified
  REGION 1..717: note = CasPhi.12 E567Q
MIKPTVSQFLTPGFKLIRNHSRTAGLKLKNEGEEACKKFVRENEIPKDECPNFQGGPAIANIIAKSREFTEWEIYQSSLAIQEVIFTLPKDKLPEPILKEEWRAQWLSEHGLDTVPYKEAAGLNLIIKNAVNTYKGVQVKVDNKNKNNLAKINRKNEIAKLNGEQEISFEEIKAFDDKGYLLQKPSPNKSIYCYQSVSPKPFITSKYHNVNLPEEYIGYYRKSNEPIVSPYQFDRLRIPIGEPGYVPKWQYTFLSKKENKRRKLSKRIKNVSPILGIICIKKDWCVFDMRGLLRTNHWKKYHKPTDSINDLFDYFTGDPVIDTKANVVRFRYKMENGIVNYKPVREKKGKELLENICDQNGSCKLATVDVGQNNPVAIGLFELKKVNGELTKTLISRHPTPIDFCNKITAYRERYDKLESSIKLDAIKQLTSEQKIEVDNYNNNFTPQNTKQIVCSKLNINPNDLPWDKMISGTHFISEKAQVSNKSEIYFTSTDKGKTKDVMKSDYKWFQDYKPKLSKEVRDALSDIEWRLRRESLEFNKLSKSREQDARQLANWISSMCDVIGIQNLVKKNNFFGGSGKREPGWDNFYKPKKENRWWINAIHKALTELSQNKGKRVILLPAMRTSITCPKCKYCDSKNRNGEKFNCLKCGIELNADIDVATENLATVAITAQSMPKPTCERSGDAKKPVRARKAKAPEFHDKLAPSYTVVLREAV

SEQ ID NO: 47 - protein, 15 aa, synthetic construct
  REGION 1..15: note = nuclear localization signal
PKKKRKVGIHGVPAA

SEQ ID NO: 48 - protein, 16 aa, synthetic construct
  REGION 1..16: note = nuclear localization signal
KRPAATKKAGQAKKKK

SEQ ID NO: 49 - protein, 8 aa, synthetic construct
  REGION 1..8: note = nuclear localization signal
  VARIANT 3: note = Xaa is any naturally occuring amino acid
  VARIANT 4: note = Tryptophan, Phenyalanine or Tyrosine
  VARIANT 5..6: note = Xaa is any naturally occuring amino acid
KRXXXXAF

SEQ ID NO: 50 - protein, 6 aa, synthetic construct
  REGION 1..6: note = nuclear localization signal
  VARIANT 5: note = Lysing or Arginine
  VARIANT 6: note = Tryptophan, Phenylalanine or Tyrosine
LGKRXX

SEQ ID NO: 51 - protein, 16 aa, synthetic construct
  REGION 1..16: note = nuclear localization signal
APKKKRKVGIHGVPAA

SEQ ID NO: 52 - protein, 20 aa, synthetic construct
  VARIANT 4: note = Xaa is any naturally occurring amino acid
  VARIANT 8: note = Xaa is any naturally occurring amino acid
  VARIANT 11: note = Xaa is any naturally occurring amino acid
  VARIANT 15: note = Xaa is any naturally occurring amino acid
  VARIANT 19: note = Xaa is any naturally occurring amino acid
GLFXALLXLLXSLWXLLLXA

SEQ ID NO: 53 - protein, 20 aa, synthetic construct
GLFHALLHLLHSLWHLLLHA

SEQ ID NO: 54 - protein, 717 aa, synthetic construct
MIKPTVSQFLTPGFKLIRNHSRTAGLKLKNEGEEACKKFVRENEIPKDECPNFQGGPAIANIIAKSREFTEWEIYQSSLAIQEVIFTLPKDKLPEPILKEEWRAQWLSRHGLDTVPYKEAAGLNLIIKNAVNTYKGVQVKVDNKNKNNLAKINRKNEIAKLNGEQEISFEEIKAFDDKGYLLQKPSPNKSIYCYQSVSPKPFITSKYHNVNLPEEYIGYYRKSNEPIVSPYQFDRLRIPIGEPGYVPKWQYTFLSKKENKRRKLSKRIKNVSPILGIICIKKDWCVFDMRGLLRTNHWKKYHKPTDSINDLFDYFTGDPVIDTKANVVRFRYKMENGIVNYKPVREKKGKELLENICDQNGSCKLATVDVGQNNPVAIGLFELKKVNGELTKTLISRHPTPIDFCNKITAYRERYDKLESSIKLDAIKQLTSEQKIEVDNYNNNFTPQNTKQIVCSKLNINPNDLPWDKMISGTHFISEKAQVSNKSEIYFTSTDKGKTKDVMKSDYKWFQDYKPKLSKEVRDALSDIEWRLRRESLEFNKLSKSREQDARQLANWISSMCDVIGIENLVKKNNFFGGSGKREPGWDNFYKPKKENRWWINAIHKALTELSQNKGKRVILLPAMRTSITCPKCKYCDSKNRNGEKFNCLKCGIELNADIDVATENLATVAITAQSMPKPTCERSGDAKKPVRARKAKAPEFHDKLAPSYTVVLREAV

SEQ ID NO: 55 - protein, 717 aa, synthetic construct
MIKPTVSQFLTPGFKLIRNHSRTAGLKLKNEGEEACKKFVRENEIPKDECPNFQGGPAIANIIAKSREFTEWEIYQSSLAIQEVIFTLPKDKLPEPILKEEWRAQWLSEHGLDTVPYKEAAGLNLIIKNAVNTYKGVQVKVDNKNKNNLAKINRKNEIAKLNGEQEISFEEIKAFDDKGYLLQKPSPNKSIYCYQSVSPKPFITSKYRNVNLPEEYIGYYRKSNEPIVSPYQFDRLRIPIGEPGYVPKWQYTFLSKKENKRRKLSKRIKNVSPILGIICIKKDWCVFDMRGLLRTNHWKKYHKPTDSINDLFDYFTGDPVIDTKANVVRFRYKMENGIVNYKPVREKKGKELLENICDQNGSCKLATVDVGQNNPVAIGLFELKKVNGELTKTLISRHPTPIDFCNKITAYRERYDKLESSIKLDAIKQLTSEQKIEVDNYNNNFTPQNTKQIVCSKLNINPNDLPWDKMISGTHFISEKAQVSNKSEIYFTSTDKGKTKDVMKSDYKWFQDYKPKLSKEVRDALSDIEWRLRRESLEFNKLSKSREQDARQLANWISSMCDVIGIENLVKKNNFFGGSGKREPGWDNFYKPKKENRWWINAIHKALTELSQNKGKRVILLPAMRTSITCPKCKYCDSKNRNGEKFNCLKCGIELNADIDVATENLATVAITAQSMPKPTCERSGDAKKPVRARKAKAPEFHDKLAPSYTVVLREAV

SEQ ID NO: 56 - protein, 717 aa, synthetic construct
MIKPTVSQFLTPGFKLIRNHSRTAGLKLKNEGEEACKKFVRENEIPKDECPNFQGGPAIANIIAKSREFTEWEIYQSSLAIQEVIFTLPKDKLPEPILKEEWRAQWLSEHGLDTVPYKEAAGLNLIIKNAVNTYKGVQVKVDNKNKNNLAKINRKNEIAKLNGEQEISFEEIKAFDDKGYLLQRPSPNKSIYCYQSVSPKPFITSKYHNVNLPEEYIGYYRKSNEPIVSPYQFDRLRIPIGEPGYVPKWQYTFLSKKENKRRKLSKRIKNVSPILGIICIKKDWCVFDMRGLLRTNHWKKYHKPTDSINDLFDYFTGDPVIDTKANVVRFRYKMENGIVNYKPVREKKGKELLENICDQNGSCKLATVDVGQNNPVAIGLFELKKVNGELTKTLISRHPTPIDFCNKITAYRERYDKLESSIKLDAIKQLTSEQKIEVDNYNNNFTPQNTKQIVCSKLNINPNDLPWDKMISGTHFISEKAQVSNKSEIYFTSTDKGKTKDVMKSDYKWFQDYKPKLSKEVRDALSDIEWRLRRESLEFNKLSKSREQDARQLANWISSMCDVIGIENLVKKNNFFGGSGKREPGWDNFYKPKKENRWWINAIHKALTELSQNKGKRVILLPAMRTSITCPKCKYCDSKNRNGEKFNCLKCGIELNADIDVATENLATVAITAQSMPKPTCERSGDAKKPVRARKAKAPEFHDKLAPSYTVVLREAV

SEQ ID NO: 57 - protein, 717 aa, synthetic construct
MIKPTVSQFLTPGFKLIRNHSRTAGLKLKNEGEEACKRFVRENEIPKDECPNFQGGPAIANIIAKSREFTEWEIYQSSLAIQEVIFTLPKDKLPEPILKEEWRAQWLSEHGLDTVPYKEAAGLNLIIKNAVNTYKGVQVKVDNKNKNNLAKINRKNEIAKLNGEQEISFEEIKAFDDKGYLLQKPSPNKSIYCYQSVSPKPFITSKYHNVNLPEEYIGYYRKSNEPIVSPYQFDRLRIPIGEPGYVPKWQYTFLSKKENKRRKLSKRIKNVSPILGIICIKKDWCVFDMRGLLRTNHWKKYHKPTDSINDLFDYFTGDPVIDTKANVVRFRYKMENGIVNYKPVREKKGKELLENICDQNGSCKLATVDVGQNNPVAIGLFELKKVNGELTKTLISRHPTPIDFCNKITAYRERYDKLESSIKLDAIKQLTSEQKIEVDNYNNNFTPQNTKQIVCSKLNINPNDLPWDKMISGTHFISEKAQVSNKSEIYFTSTDKGKTKDVMKSDYKWFQDYKPKLSKEVRDALSDIEWRLRRESLEFNKLSKSREQDARQLANWISSMCDVIGIENLVKKNNFFGGSGKREPGWDNFYKPKKENRWWINAIHKALTELSQNKGKRVILLPAMRTSITCPKCKYCDSKNRNGEKFNCLKCGIELNADIDVATENLATVAITAQSMPKPTCERSGDAKKPVRARKAKAPEFHDKLAPSYTVVLREAV

SEQ ID NO: 58 - protein, 717 aa, synthetic construct
MIKPTVSQFLTPGFKLIRNHSRTAGLKLKNEGEEACKKFVRENEIPKDECPNFQGGPAIANIIAKSREFTEWEIYQSSLAIQEVIFTLPKDKLPEPILKEEWRAQWLSEHGLDTVPYKEAAGLNLIIKNAVNTYKGVQVKVDNKNKNNLAKINRKNEIAKLNGEQEISFEEIKAFDDKGYLRQKPSPNKSIYCYQSVSPKPFITSKYHNVNLPEEYIGYYRKSNEPIVSPYQFDRLRIPIGEPGYVPKWQYTFLSKKENKRRKLSKRIKNVSPILGIICIKKDWCVFDMRGLLRTNHWKKYHKPTDSINDLFDYFTGDPVIDTKANVVRFRYKMENGIVNYKPVREKKGKELLENICDQNGSCKLATVDVGQNNPVAIGLFELKKVNGELTKTLISRHPTPIDFCNKITAYRERYDKLESSIKLDAIKQLTSEQKIEVDNYNNNFTPQNTKQIVCSKLNINPNDLPWDKMISGTHFISEKAQVSNKSEIYFTSTDKGKTKDVMKSDYKWFQDYKPKLSKEVRDALSDIEWRLRRESLEFNKLSKSREQDARQLANWISSMCDVIGIENLVKKNNFFGGSGKREPGWDNFYKPKKENRWWINAIHKALTELSQNKGKRVILLPAMRTSITCPKCKYCDSKNRNGEKFNCLKCGIELNADIDVATENLATVAITAQSMPKPTCERSGDAKKPVRARKAKAPEFHDKLAPSYTVVLREAV

SEQ ID NO: 59 - protein, 717 aa, synthetic construct
MIKPTVSQFLTPGFKLIRNHSRTAGLKLKNEGEEACKKFVRENEIPKDECPNFQGGPAIANIIAKSREFTEWEIYQSSLAIQEVIFTLPKDKLPEPILKEEWRAQWLSEHGLDTVPYKEAAGLNLIIKNAVNTYKGVQVKVDNKNKNNLAKINRKNEIAKLNGEQEISFEEIKAFDDKGYLLRKPSPNKSIYCYQSVSPKPFITSKYHNVNLPEEYIGYYRKSNEPIVSPYQFDRLRIPIGEPGYVPKWQYTFLSKKENKRRKLSKRIKNVSPILGIICIKKDWCVFDMRGLLRTNHWKKYHKPTDSINDLFDYFTGDPVIDTKANVVRFRYKMENGIVNYKPVREKKGKELLENICDQNGSCKLATVDVGQNNPVAIGLFELKKVNGELTKTLISRHPTPIDFCNKITAYRERYDKLESSIKLDAIKQLTSEQKIEVDNYNNNFTPQNTKQIVCSKLNINPNDLPWDKMISGTHFISEKAQVSNKSEIYFTSTDKGKTKDVMKSDYKWFQDYKPKLSKEVRDALSDIEWRLRRESLEFNKLSKSREQDARQLANWISSMCDVIGIENLVKKNNFFGGSGKREPGWDNFYKPKKENRWWINAIHKALTELSQNKGKRVILLPAMRTSITCPKCKYCDSKNRNGEKFNCLKCGIELNADIDVATENLATVAITAQSMPKPTCERSGDAKKPVRARKAKAPEFHDKLAPSYTVVLREAV

SEQ ID NO: 60 - protein, 717 aa, synthetic construct
MIKPTVSQFLTPGFKLIRNHSRTAGLKLKNEGEEACKKFVRENEIPKDECPNFQGGPAIANIIAKSREFTEWEIYQSSLAIQEVIFTLPKDKLPEPILKEEWRAQWLREHGLDTVPYKEAAGLNLIIKNAVNTYKGVQVKVDNKNKNNLAKINRKNEIAKLNGEQEISFEEIKAFDDKGYLLQKPSPNKSIYCYQSVSPKPFITSKYHNVNLPEEYIGYYRKSNEPIVSPYQFDRLRIPIGEPGYVPKWQYTFLSKKENKRRKLSKRIKNVSPILGIICIKKDWCVFDMRGLLRTNHWKKYHKPTDSINDLFDYFTGDPVIDTKANVVRFRYKMENGIVNYKPVREKKGKELLENICDQNGSCKLATVDVGQNNPVAIGLFELKKVNGELTKTLISRHPTPIDFCNKITAYRERYDKLESSIKLDAIKQLTSEQKIEVDNYNNNFTPQNTKQIVCSKLNINPNDLPWDKMISGTHFISEKAQVSNKSEIYFTSTDKGKTKDVMKSDYKWFQDYKPKLSKEVRDALSDIEWRLRRESLEFNKLSKSREQDARQLANWISSMCDVIGIENLVKKNNFFGGSGKREPGWDNFYKPKKENRWWINAIHKALTELSQNKGKRVILLPAMRTSITCPKCKYCDSKNRNGEKFNCLKCGIELNADIDVATENLATVAITAQSMPKPTCERSGDAKKPVRARKAKAPEFHDKLAPSYTVVLREAV

SEQ ID NO: 61 - protein, 717 aa, synthetic construct
MIKPTVSQFLTPGFKLIRNHSRTAGLKLKNEGEEACKKFVRENEIPKDECPNFQGGPAIANIIAKSREFTEWEIYQSSLAIQEVIFTLPKDKLPEPILKEEWRAQWLSEHGLDTVPYKEAAGLNLIIKNAVNTYKGVQVKVDNKNKNNLAKINRKNEIAKLNGEQEISFEEIKAFDDKGYLLQKPSPNKSIYCYQSVRPKPFITSKYHNVNLPEEYIGYYRKSNEPIVSPYQFDRLRIPIGEPGYVPKWQYTFLSKKENKRRKLSKRIKNVSPILGIICIKKDWCVFDMRGLLRTNHWKKYHKPTDSINDLFDYFTGDPVIDTKANVVRFRYKMENGIVNYKPVREKKGKELLENICDQNGSCKLATVDVGQNNPVAIGLFELKKVNGELTKTLISRHPTPIDFCNKITAYRERYDKLESSIKLDAIKQLTSEQKIEVDNYNNNFTPQNTKQIVCSKLNINPNDLPWDKMISGTHFISEKAQVSNKSEIYFTSTDKGKTKDVMKSDYKWFQDYKPKLSKEVRDALSDIEWRLRRESLEFNKLSKSREQDARQLANWISSMCDVIGIENLVKKNNFFGGSGKREPGWDNFYKPKKENRWWINAIHKALTELSQNKGKRVILLPAMRTSITCPKCKYCDSKNRNGEKFNCLKCGIELNADIDVATENLATVAITAQSMPKPTCERSGDAKKPVRARKAKAPEFHDKLAPSYTVVLREAV

SEQ ID NO: 62 - protein, 717 aa, synthetic construct
MIKPTVSQFLTPGFKLIRNHSRTAGLKLKNEGEEACKKFVRENEIPKDECPNFQGGPAIANIIAKSREFTEWEIYQSSLAIQEVIFTLPKDKLPEPILKEEWRAQWLSEHGLDRVPYKEAAGLNLIIKNAVNTYKGVQVKVDNKNKNNLAKINRKNEIAKLNGEQEISFEEIKAFDDKGYLLQKPSPNKSIYCYQSVSPKPFITSKYHNVNLPEEYIGYYRKSNEPIVSPYQFDRLRIPIGEPGYVPKWQYTFLSKKENKRRKLSKRIKNVSPILGIICIKKDWCVFDMRGLLRTNHWKKYHKPTDSINDLFDYFTGDPVIDTKANVVRFRYKMENGIVNYKPVREKKGKELLENICDQNGSCKLATVDVGQNNPVAIGLFELKKVNGELTKTLISRHPTPIDFCNKITAYRERYDKLESSIKLDAIKQLTSEQKIEVDNYNNNFTPQNTKQIVCSKLNINPNDLPWDKMISGTHFISEKAQVSNKSEIYFTSTDKGKTKDVMKSDYKWFQDYKPKLSKEVRDALSDIEWRLRRESLEFNKLSKSREQDARQLANWISSMCDVIGIENLVKKNNFFGGSGKREPGWDNFYKPKKENRWWINAIHKALTELSQNKGKRVILLPAMRTSITCPKCKYCDSKNRNGEKFNCLKCGIELNADIDVATENLATVAITAQSMPKPTCERSGDAKKPVRARKAKAPEFHDKLAPSYTVVLREAV

SEQ ID NO: 63 - protein, 717 aa, synthetic construct
MIKPTVSQFLTPGFKLIRNHSRTAGLKLKNEGEEACKKFVRENEIPKDECPNFQGGPAIANIIAKSREFTEWEIYQSSLAIQEVIFTLPKDKLPEPILKEEWRAQWLSEHGLDTVPYKEAAGLNLIIKNAVNTYKGVQVKVDNKNKNNLAKINRKNEIAKLNGEQEISFEEIKAFDDKGYLLQKPSPNKSIYCYQSVSPKPFITSKYHNVNLPEEYIGYYRKSNEPIVSPYQFDRLRIPIGEPGYVPKWQYTFLSKKENKRRKLSKRIKNVSPILGIICIKKDWCVFDMRGLLRTNHWKKYHKPTDSINDLFDYFTGDPVIDTKANVVRFRYKMENGIVNYKPVREKKGKELLENICDQNGSCKLATVAVGQNNPVAIGLFELKKVNGELTKTLISRHPTPIDFCNKITAYRERYDKLESSIKLDAIKQLTSEQKIEVDNYNNNFTPQNTKQIVCSKLNINPNDLPWDKMISGTHFISEKAQVSNKSEIYFTSTDKGKTKDVMKSDYKWFQDYKPKLSKEVRDALSDIEWRLRRESLEFNKLSKSREQDARQLANWISSMCDVIGIENLVKKNNFFGGSGKREPGWDNFYKPKKENRWWINAIHKALTELSQNKGKRVILLPAMRTSITCPKCKYCDSKNRNGEKFNCLKCGIELNADIDVATENLATVAITAQSMPKPTCERSGDAKKPVRARKAKAPEFHDKLAPSYTVVLREAV

SEQ ID NO: 64 - protein, 717 aa, synthetic construct
MIKPTVSQFLTPGFKLIRNHSRTAGLKLKNEGEEACKKFVRENEIPKDECPNFQGGPAIANIIAKSREFTEWEIYQSSLAIQEVIFTLPKDKLPEPILKEEWRAQWLSEHGLDTVPYKEAAGLNLIIKNAVNTYKGVQVKVDNKNKNNLAKINRKNEIAKLNGEQEISFEEIKAFDDKGYLLQKPSPNKSIYCYQSVSPKPFITSKYHNVNLPEEYIGYYRKSNEPIVSPYQFDRLRIPIGEPGYVPKWQYTFLSKKENKRRKLSKRIKNVSPILGIICIKKDWCVFDMRGLLRTNHWKKYHKPTDSINDLFDYFTGDPVIDTKANVVRFRYKMENGIVNYKPVREKKGKELLENICDQNGSCKLATVNVGQNNPVAIGLFELKKVNGELTKTLISRHPTPIDFCNKITAYRERYDKLESSIKLDAIKQLTSEQKIEVDNYNNNFTPQNTKQIVCSKLNINPNDLPWDKMISGTHFISEKAQVSNKSEIYFTSTDKGKTKDVMKSDYKWFQDYKPKLSKEVRDALSDIEWRLRRESLEFNKLSKSREQDARQLANWISSMCDVIGIENLVKKNNFFGGSGKREPGWDNFYKPKKENRWWINAIHKALTELSQNKGKRVILLPAMRTSITCPKCKYCDSKNRNGEKFNCLKCGIELNADIDVATENLATVAITAQSMPKPTCERSGDAKKPVRARKAKAPEFHDKLAPSYTVVLREAV

SEQ ID NO: 65 - protein, 717 aa, synthetic construct
MIKPTVSQFLTPGFKLIRNHSRTAGLKLKNEGEEACKKFVRENEIPKDECPNFQGGPAIANIIAKSREFTEWEIYQSSLAIQEVIFTLPKDKLPEPILKEEWRAQWLSEHGLDTVPYKEAAGLNLIIKNAVNTYKGVQVKVDNKNKNNLAKINRKNEIAKLNGEQEISFEEIKAFDDKGYLLQKPSPNKSIYCYQSVSPKPFITSKYHNVNLPEEYIGYYRKSNEPIVSPYQFDRLRIPIGEPGYVPKWQYTFLSKKENKRRKLSKRIKNVSPILGIICIKKDWCVFDMRGLLRTNHWKKYHKPTDSINDLFDYFTGDPVIDTKANVVRFRYKMENGIVNYKPVREKKGKELLENICDQNGSCKLATVDVGQNNPVAIGLFELKKVNGELTKTLISRHPTPIDFCNKITAYRERYDKLESSIKLDAIKQLTSEQKIEVDNYNNNFTPQNTKQIVCSKLNINPNDLPWDKMISGTHFISEKAQVSNKSEIYFTSTDKGKTKDVMKSDYKWFQDYKPKLSKEVRDALSDIEWRLRRESLEFNKLSKSREQDARQLANWISSMCDVIGIENLVKKNNFFGGSGKREPGWDNFYKPKKENRWWINAIHKALTELSQNKGKRVILLPAMRTSITCPKCKYCDSKNRNGEKFNCLKCGIELNAAIDVATENLATVAITAQSMPKPTCERSGDAKKPVRARKAKAPEFHDKLAPSYTVVLREAV

SEQ ID NO: 66 - protein, 717 aa, synthetic construct
MIKPTVSQFLTPGFKLIRNHSRTAGLKLKNEGEEACKKFVRENEIPKDECPNFQGGPAIANIIAKSREFTEWEIYQSSLAIQEVIFTLPKDKLPEPILKEEWRAQWLSEHGLDTVPYKEAAGLNLIIKNAVNTYKGVQVKVDNKNKNNLAKINRKNEIAKLNGEQEISFEEIKAFDDKGYLLQKPSPNKSIYCYQSVSPKPFITSKYHNVNLPEEYIGYYRKSNEPIVSPYQFDRLRIPIGEPGYVPKWQYTFLSKKENKRRKLSKRIKNVSPILGIICIKKDWCVFDMRGLLRTNHWKKYHKPTDSINDLFDYFTGDPVIDTKANVVRFRYKMENGIVNYKPVREKKGKELLENICDQNGSCKLATVDVGQNNPVAIGLFELKKVNGELTKTLISRHPTPIDFCNKITAYRERYDKLESSIKLDAIKQLTSEQKIEVDNYNNNFTPQNTKQIVCSKLNINPNDLPWDKMISGTHFISEKAQVSNKSEIYFTSTDKGKTKDVMKSDYKWFQDYKPKLSKEVRDALSDIEWRLRRESLEFNKLSKSREQDARQLANWISSMCDVIGIENLVKKNNFFGGSGKREPGWDNFYKPKKENRWWINAIHKALTELSQNKGKRVILLPAMRTSITCPKCKYCDSKNRNGEKFNCLKCGIELNANIDVATENLATVAITAQSMPKPTCERSGDAKKPVRARKAKAPEFHDKLAPSYTVVLREAV

SEQ ID NO: 67 - RNA, 17 nt, synthetic construct
  source 1..17: mol_type = other RNA
ccctccccagagggcat

SEQ ID NO: 68 - RNA, 17 nt, synthetic construct
  source 1..17: mol_type = other RNA
cccctccccagagggca

SEQ ID NO: 69 - RNA, 17 nt, synthetic construct
  source 1..17: mol_type = other RNA
cttgcaggaacagaggc

SEQ ID NO: 70 - RNA, 17 nt, synthetic construct
  source 1..17: mol_type = other RNA
cctcaggagcttcagag

SEQ ID NO: 71 - RNA, 17 nt, synthetic construct
  source 1..17: mol_type = other RNA
ctcaggagcttcagagg

SEQ ID NO: 72 - RNA, 17 nt, synthetic construct
  source 1..17: mol_type = other RNA
tcatgccctgctctgtt

SEQ ID NO: 73 - RNA, 41 nt, synthetic construct
  source 1..41: mol_type = other RNA
atagattgctccttacgaggagacccctccccagagggcat

SEQ ID NO: 74 - RNA, 41 nt, synthetic construct
  source 1..41: mol_type = other RNA
atagattgctccttacgaggagaccccctccccagagggca

SEQ ID NO: 75 - RNA, 41 nt, synthetic construct
  source 1..41: mol_type = other RNA
atagattgctccttacgaggagaccttgcaggaacagaggc

SEQ ID NO: 76 - RNA, 41 nt, synthetic construct
  source 1..41: mol_type = other RNA
atagattgctccttacgaggagaccctcaggagcttcagag

SEQ ID NO: 77 - RNA, 41 nt, synthetic construct
  source 1..41: mol_type = other RNA
atagattgctccttacgaggagacctcaggagcttcagagg

SEQ ID NO: 78 - RNA, 41 nt, synthetic construct
  source 1..41: mol_type = other RNA
atagattgctccttacgaggagactcatgccctgctctgtt

SEQ ID NO: 79 - RNA, 17 nt, synthetic construct
  source 1..17: mol_type = other RNA
cggtggggaggactgtg

SEQ ID NO: 80 - RNA, 17 nt, synthetic construct
  source 1..17: mol_type = other RNA
cgttccgaggaggacgg

SEQ ID NO: 81 - RNA, 17 nt, synthetic construct
  source 1..17: mol_type = other RNA
cgaggaggacggcctgg

SEQ ID NO: 82 - RNA, 17 nt, synthetic construct
  source 1..17: mol_type = other RNA
gcgcagcggtggaaggt

SEQ ID NO: 83 - RNA, 17 nt, synthetic construct
  source 1..17: mol_type = other RNA
agcaccaccacgtaggt

SEQ ID NO: 84 - RNA, 17 nt, synthetic construct
  source 1..17: mol_type = other RNA
ggcctgcaggcggcggg

SEQ ID NO: 85 - RNA, 17 nt, synthetic construct
  source 1..17: mol_type = other RNA
gtgaggtatccccggcg

SEQ ID NO: 86 - RNA, 17 nt, synthetic construct
  source 1..17: mol_type = other RNA
ttcctggcttcctggtg

SEQ ID NO: 87 - RNA, 17 nt, synthetic construct
  source 1..17: mol_type = other RNA
accaggaagccaggaag

SEQ ID NO: 88 - RNA, 17 nt, synthetic construct
  source 1..17: mol_type = other RNA
ctggcttcctggtgaag

SEQ ID NO: 89 - RNA, 17 nt, synthetic construct
  source 1..17: mol_type = other RNA
ctggtgaagatgagtgg

SEQ ID NO: 90 - RNA, 17 nt, synthetic construct
  source 1..17: mol_type = other RNA
ccccatgtcgactacat

SEQ ID NO: 91 - RNA, 17 nt, synthetic construct
  source 1..17: mol_type = other RNA
atccgcccggtaccgtg

SEQ ID NO: 92 - RNA, 17 nt, synthetic construct
  source 1..17: mol_type = other RNA
ccggtggtcactctgta

SEQ ID NO: 93 - RNA, 17 nt, synthetic construct
  source 1..17: mol_type = other RNA
cccggtggtcactctgt

SEQ ID NO: 94 - RNA, 17 nt, synthetic construct
  source 1..17: mol_type = other RNA
gccacgccggcatcccg

SEQ ID NO: 95 - RNA, 17 nt, synthetic construct
  source 1..17: mol_type = other RNA
gcagttgagcacgcgca

SEQ ID NO: 96 - RNA, 17 nt, synthetic construct
  source 1..17: mol_type = other RNA
ccttggcagttgagcac

SEQ ID NO: 97 - RNA, 17 nt, synthetic construct
  source 1..17: mol_type = other RNA
ccgaataaactccaggc

SEQ ID NO: 98 - RNA, 17 nt, synthetic construct
  source 1..17: mol_type = other RNA
tccgaataaactccagg

SEQ ID NO: 99 - RNA, 17 nt, synthetic construct
  source 1..17: mol_type = other RNA
attcggaaaagccagct

SEQ ID NO: 100 - RNA, 17 nt, synthetic construct
  source 1..17: mol_type = other RNA
ttcggaaaagccagctg

SEQ ID NO: 101 - RNA, 17 nt, synthetic construct
  source 1..17: mol_type = other RNA
ggaaaagccagctggtc

SEQ ID NO: 102 - RNA, 17 nt, synthetic construct
  source 1..17: mol_type = other RNA
tgctgctgcccctggcg

SEQ ID NO: 103 - RNA, 17 nt, synthetic construct
  source 1..17: mol_type = other RNA
aacgccgcctgccagcg

SEQ ID NO: 104 - RNA, 17 nt, synthetic construct
  source 1..17: mol_type = other RNA
ccggcagcggtgaccag

SEQ ID NO: 105 - RNA, 17 nt, synthetic construct
  source 1..17: mol_type = other RNA
cgggacgatgcctgcct

SEQ ID NO: 106 - RNA, 17 nt, synthetic construct
  source 1..17: mol_type = other RNA
gtggccccaactgtgat

SEQ ID NO: 107 - RNA, 17 nt, synthetic construct
  source 1..17: mol_type = other RNA
gtccccaaagtccccag

SEQ ID NO: 108 - RNA, 17 nt, synthetic construct
  source 1..17: mol_type = other RNA
ggggaccaactttggcc

SEQ ID NO: 109 - RNA, 17 nt, synthetic construct
  source 1..17: mol_type = other RNA
gggaccaactttggccg

SEQ ID NO: 110 - RNA, 17 nt, synthetic construct
  source 1..17: mol_type = other RNA
ggccgctgtgtggacct

SEQ ID NO: 111 - RNA, 17 nt, synthetic construct
  source 1..17: mol_type = other RNA
gccgctgtgtggacctc

SEQ ID NO: 112 - RNA, 17 nt, synthetic construct
  source 1..17: mol_type = other RNA
gccccaggggaggacat

SEQ ID NO: 113 - RNA, 17 nt, synthetic construct
  source 1..17: mol_type = other RNA
ccccaggggaggacatc

SEQ ID NO: 114 - RNA, 17 nt, synthetic construct
  source 1..17: mol_type = other RNA
gtgcctccagcgactgc

SEQ ID NO: 115 - RNA, 17 nt, synthetic construct
  source 1..17: mol_type = other RNA
cagccatgatgctgtct

SEQ ID NO: 116 - RNA, 17 nt, synthetic construct
  source 1..17: mol_type = other RNA
aggcagagactgatcca

SEQ ID NO: 117 - RNA, 17 nt, synthetic construct
  source 1..17: mol_type = other RNA
gcagagaagtggatcag

SEQ ID NO: 118 - RNA, 17 nt, synthetic construct
  source 1..17: mol_type = other RNA
ggcagagaagtggatca

SEQ ID NO: 119 - RNA, 17 nt, synthetic construct
  source 1..17: mol_type = other RNA
tctgccaaagatgtcat

SEQ ID NO: 120 - RNA, 17 nt, synthetic construct
  source 1..17: mol_type = other RNA
atgacatctttggcaga

SEQ ID NO: 121 - RNA, 17 nt, synthetic construct
  source 1..17: mol_type = other RNA
cctgaggaccagcgggt

SEQ ID NO: 122 - RNA, 17 nt, synthetic construct
  source 1..17: mol_type = other RNA
ggggtcagtacccgctg

SEQ ID NO: 123 - RNA, 17 nt, synthetic construct
  source 1..17: mol_type = other RNA
gcagctgttttgcagga

SEQ ID NO: 124 - RNA, 17 nt, synthetic construct
  source 1..17: mol_type = other RNA
ccactcctggagaaact

SEQ ID NO: 125 - RNA, 17 nt, synthetic construct
  source 1..17: mol_type = other RNA
ctccaggagtgggaagc

SEQ ID NO: 126 - RNA, 17 nt, synthetic construct
  source 1..17: mol_type = other RNA
tccaggagtgggaagcg

SEQ ID NO: 127 - RNA, 17 nt, synthetic construct
  source 1..17: mol_type = other RNA
tgggggtgagggtgtct

SEQ ID NO: 128 - RNA, 17 nt, synthetic construct
  source 1..17: mol_type = other RNA
gggggtgagggtgtcta

SEQ ID NO: 129 - RNA, 17 nt, synthetic construct
  source 1..17: mol_type = other RNA
ggggtgagggtgtctac

SEQ ID NO: 130 - RNA, 17 nt, synthetic construct
  source 1..17: mol_type = other RNA
ccaggtgctgcctgcta

SEQ ID NO: 131 - RNA, 17 nt, synthetic construct
  source 1..17: mol_type = other RNA
tgggtgccaaggtcctc

SEQ ID NO: 132 - RNA, 17 nt, synthetic construct
  source 1..17: mol_type = other RNA
gcacccacaagccgcct

SEQ ID NO: 133 - RNA, 17 nt, synthetic construct
  source 1..17: mol_type = other RNA
ggctgacctcgtggcct

SEQ ID NO: 134 - RNA, 17 nt, synthetic construct
  source 1..17: mol_type = other RNA
cattccagacctggggc

SEQ ID NO: 135 - RNA, 17 nt, synthetic construct
  source 1..17: mol_type = other RNA
gcattccagacctgggg

SEQ ID NO: 136 - RNA, 17 nt, synthetic construct
  source 1..17: mol_type = other RNA
actttgcattccagacc

SEQ ID NO: 137 - RNA, 17 nt, synthetic construct
  source 1..17: mol_type = other RNA
catgctccttgactttg

SEQ ID NO: 138 - RNA, 17 nt, synthetic construct
  source 1..17: mol_type = other RNA
tcgtggcctgtgaggac

SEQ ID NO: 139 - RNA, 17 nt, synthetic construct
  source 1..17: mol_type = other RNA
ttcgctggtgctgcctg

SEQ ID NO: 140 - RNA, 17 nt, synthetic construct
  source 1..17: mol_type = other RNA
ccatctgctgccggagc

SEQ ID NO: 141 - RNA, 41 nt, synthetic construct
  source 1..41: mol_type = other RNA
atagattgctccttacgaggagaccggtggggaggactgtg

SEQ ID NO: 142 - RNA, 41 nt, synthetic construct
  source 1..41: mol_type = other RNA
atagattgctccttacgaggagaccgttccgaggaggacgg

SEQ ID NO: 143 - RNA, 41 nt, synthetic construct
  source 1..41: mol_type = other RNA
atagattgctccttacgaggagaccgaggaggacggcctgg

SEQ ID NO: 144 - RNA, 41 nt, synthetic construct
  source 1..41: mol_type = other RNA
atagattgctccttacgaggagacgcgcagcggtggaaggt

SEQ ID NO: 145 - RNA, 41 nt, synthetic construct
  source 1..41: mol_type = other RNA
atagattgctccttacgaggagacagcaccaccacgtaggt

SEQ ID NO: 146 - RNA, 41 nt, synthetic construct
  source 1..41: mol_type = other RNA
atagattgctccttacgaggagacggcctgcaggcggcggg

SEQ ID NO: 147 - RNA, 41 nt, synthetic construct
  source 1..41: mol_type = other RNA
atagattgctccttacgaggagacgtgaggtatccccggcg

SEQ ID NO: 148 - RNA, 41 nt, synthetic construct
  source 1..41: mol_type = other RNA
atagattgctccttacgaggagacttcctggcttcctggtg

SEQ ID NO: 149 - RNA, 41 nt, synthetic construct
  source 1..41: mol_type = other RNA
atagattgctccttacgaggagacaccaggaagccaggaag

SEQ ID NO: 150 - RNA, 41 nt, synthetic construct
  source 1..41: mol_type = other RNA
atagattgctccttacgaggagacctggcttcctggtgaag

SEQ ID NO: 151 - RNA, 41 nt, synthetic construct
  source 1..41: mol_type = other RNA
atagattgctccttacgaggagacctggtgaagatgagtgg

SEQ ID NO: 152 - RNA, 41 nt, synthetic construct
  source 1..41: mol_type = other RNA
atagattgctccttacgaggagacccccatgtcgactacat

SEQ ID NO: 153 - RNA, 41 nt, synthetic construct
  source 1..41: mol_type = other RNA
atagattgctccttacgaggagacatccgcccggtaccgtg

SEQ ID NO: 154 - RNA, 41 nt, synthetic construct
  source 1..41: mol_type = other RNA
atagattgctccttacgaggagacccggtggtcactctgta

SEQ ID NO: 155 - RNA, 41 nt, synthetic construct
  source 1..41: mol_type = other RNA
atagattgctccttacgaggagaccccggtggtcactctgt

SEQ ID NO: 156 - RNA, 41 nt, synthetic construct
  source 1..41: mol_type = other RNA
atagattgctccttacgaggagacgccacgccggcatcccg

SEQ ID NO: 157 - RNA, 41 nt, synthetic construct
  source 1..41: mol_type = other RNA
atagattgctccttacgaggagacgcagttgagcacgcgca

SEQ ID NO: 158 - RNA, 41 nt, synthetic construct
  source 1..41: mol_type = other RNA
atagattgctccttacgaggagacccttggcagttgagcac

SEQ ID NO: 159 - RNA, 41 nt, synthetic construct
  source 1..41: mol_type = other RNA
atagattgctccttacgaggagacccgaataaactccaggc

SEQ ID NO: 160 - RNA, 41 nt, synthetic construct
  source 1..41: mol_type = other RNA
atagattgctccttacgaggagactccgaataaactccagg

SEQ ID NO: 161 - RNA, 41 nt, synthetic construct
  source 1..41: mol_type = other RNA
atagattgctccttacgaggagacattcggaaaagccagct

SEQ ID NO: 162 - RNA, 41 nt, synthetic construct
  source 1..41: mol_type = other RNA
atagattgctccttacgaggagacttcggaaaagccagctg

SEQ ID NO: 163 - RNA, 41 nt, synthetic construct
  source 1..41: mol_type = other RNA
atagattgctccttacgaggagacggaaaagccagctggtc

SEQ ID NO: 164 - RNA, 41 nt, synthetic construct
  source 1..41: mol_type = other RNA
atagattgctccttacgaggagactgctgctgcccctggcg

SEQ ID NO: 165 - RNA, 41 nt, synthetic construct
  source 1..41: mol_type = other RNA
atagattgctccttacgaggagacaacgccgcctgccagcg

SEQ ID NO: 166 - RNA, 41 nt, synthetic construct
  source 1..41: mol_type = other RNA
atagattgctccttacgaggagacccggcagcggtgaccag

SEQ ID NO: 167 - RNA, 41 nt, synthetic construct
  source 1..41: mol_type = other RNA
atagattgctccttacgaggagaccgggacgatgcctgcct

SEQ ID NO: 168 - RNA, 41 nt, synthetic construct
  source 1..41: mol_type = other RNA
atagattgctccttacgaggagacgtggccccaactgtgat

SEQ ID NO: 169 - RNA, 41 nt, synthetic construct
  source 1..41: mol_type = other RNA
atagattgctccttacgaggagacgtccccaaagtccccag

SEQ ID NO: 170 - RNA, 41 nt, synthetic construct
  source 1..41: mol_type = other RNA
atagattgctccttacgaggagacggggaccaactttggcc

SEQ ID NO: 171 - RNA, 41 nt, synthetic construct
  source 1..41: mol_type = other RNA
atagattgctccttacgaggagacgggaccaactttggccg

SEQ ID NO: 172 - RNA, 41 nt, synthetic construct
  source 1..41: mol_type = other RNA
atagattgctccttacgaggagacggccgctgtgtggacct

SEQ ID NO: 173 - RNA, 41 nt, synthetic construct
  source 1..41: mol_type = other RNA
atagattgctccttacgaggagacgccgctgtgtggacctc

SEQ ID NO: 174 - RNA, 41 nt, synthetic construct
  source 1..41: mol_type = other RNA
atagattgctccttacgaggagacgccccaggggaggacat

SEQ ID NO: 175 - RNA, 41 nt, synthetic construct
  source 1..41: mol_type = other RNA
atagattgctccttacgaggagacccccaggggaggacatc

SEQ ID NO: 176 - RNA, 41 nt, synthetic construct
  source 1..41: mol_type = other RNA
atagattgctccttacgaggagacgtgcctccagcgactgc

SEQ ID NO: 177 - RNA, 41 nt, synthetic construct
  source 1..41: mol_type = other RNA
atagattgctccttacgaggagaccagccatgatgctgtct

SEQ ID NO: 178 - RNA, 41 nt, synthetic construct
  source 1..41: mol_type = other RNA
atagattgctccttacgaggagacaggcagagactgatcca

SEQ ID NO: 179 - RNA, 41 nt, synthetic construct
  source 1..41: mol_type = other RNA
atagattgctccttacgaggagacgcagagaagtggatcag

SEQ ID NO: 180 - RNA, 41 nt, synthetic construct
  source 1..41: mol_type = other RNA
atagattgctccttacgaggagacggcagagaagtggatca

SEQ ID NO: 181 - RNA, 41 nt, synthetic construct
  source 1..41: mol_type = other RNA
atagattgctccttacgaggagactctgccaaagatgtcat

SEQ ID NO: 182 - RNA, 41 nt, synthetic construct
  source 1..41: mol_type = other RNA
atagattgctccttacgaggagacatgacatctttggcaga

SEQ ID NO: 183 - RNA, 41 nt, synthetic construct
  source 1..41: mol_type = other RNA
atagattgctccttacgaggagaccctgaggaccagcgggt

SEQ ID NO: 184 - RNA, 41 nt, synthetic construct
  source 1..41: mol_type = other RNA
atagattgctccttacgaggagacggggtcagtacccgctg

SEQ ID NO: 185 - RNA, 41 nt, synthetic construct
  source 1..41: mol_type = other RNA
atagattgctccttacgaggagacgcagctgttttgcagga

SEQ ID NO: 186 - RNA, 41 nt, synthetic construct
  source 1..41: mol_type = other RNA
atagattgctccttacgaggagacccactcctggagaaact

SEQ ID NO: 187 - RNA, 41 nt, synthetic construct
  source 1..41: mol_type = other RNA
atagattgctccttacgaggagacctccaggagtgggaagc

SEQ ID NO: 188 - RNA, 41 nt, synthetic construct
  source 1..41: mol_type = other RNA
atagattgctccttacgaggagactccaggagtgggaagcg

SEQ ID NO: 189 - RNA, 41 nt, synthetic construct
  source 1..41: mol_type = other RNA
atagattgctccttacgaggagactgggggtgagggtgtct

SEQ ID NO: 190 - RNA, 41 nt, synthetic construct
  source 1..41: mol_type = other RNA
atagattgctccttacgaggagacgggggtgagggtgtcta

SEQ ID NO: 191 - RNA, 41 nt, synthetic construct
  source 1..41: mol_type = other RNA
atagattgctccttacgaggagacggggtgagggtgtctac

SEQ ID NO: 192 - RNA, 41 nt, synthetic construct
  source 1..41: mol_type = other RNA
atagattgctccttacgaggagacccaggtgctgcctgcta

SEQ ID NO: 193 - RNA, 41 nt, synthetic construct
  source 1..41: mol_type = other RNA
atagattgctccttacgaggagactgggtgccaaggtcctc

SEQ ID NO: 194 - RNA, 41 nt, synthetic construct
  source 1..41: mol_type = other RNA
atagattgctccttacgaggagacgcacccacaagccgcct

SEQ ID NO: 195 - RNA, 41 nt, synthetic construct
  source 1..41: mol_type = other RNA
atagattgctccttacgaggagacggctgacctcgtggcct

SEQ ID NO: 196 - RNA, 41 nt, synthetic construct
  source 1..41: mol_type = other RNA
atagattgctccttacgaggagaccattccagacctggggc

SEQ ID NO: 197 - RNA, 41 nt, synthetic construct
  source 1..41: mol_type = other RNA
atagattgctccttacgaggagacgcattccagacctgggg

SEQ ID NO: 198 - RNA, 41 nt, synthetic construct
  source 1..41: mol_type = other RNA
atagattgctccttacgaggagacactttgcattccagacc

SEQ ID NO: 199 - RNA, 41 nt, synthetic construct
  source 1..41: mol_type = other RNA
atagattgctccttacgaggagaccatgctccttgactttg

SEQ ID NO: 200 - RNA, 41 nt, synthetic construct
  source 1..41: mol_type = other RNA
atagattgctccttacgaggagactcgtggcctgtgaggac

SEQ ID NO: 201 - RNA, 41 nt, synthetic construct
  source 1..41: mol_type = other RNA
atagattgctccttacgaggagacttcgctggtgctgcctg

SEQ ID NO: 202 - RNA, 41 nt, synthetic construct
  source 1..41: mol_type = other RNA
atagattgctccttacgaggagacccatctgctgccggagc

SEQ ID NO: 203 - protein, 698 aa, synthetic construct
MIKPTVSQFLTPGFKLIRNHSRTAGLKLKNEGEEACKKFVRENEIPKDECPNFQGGPAIANIIAKSREFTEWEIYQSSLAIQEVIFTLPKDKLPEPILKEEWRAQWLSEHGLDTVPYKEAAGLNLIIKNAVNTYKGVQVKVDNKNKNNLAKINRKNEIAKLNGEQEISFEEIKAFDDKGYLLQKPSPNKSIYCYQSVSPKPFITSKYHNVNLPEEYIGYYRKSNEPIVSPYQFDRLRIPIGEPGYVPKWQYTFLSKKENKRRKLSKRIKNVSPILGIICIKKDWCVFDMRGLLRTNHWKKYHKPTDSINDLFDYFTGDPVIDTKANVVRFRYKMENGIVNYKPVREKKGKELLENICDQNGSCKLATVDVGQNNPVAIGLFELKKVNGELTKTLISRHPTPIDFCNKITAYRERYDKLESSIKLDAIKQLTSEQKIEVDNYNNNFTPQNTKQIVCSKLNINPNDLPWDKMISGTHFISEKAQGSSGDYKWFQDYKPKLSKEVRDALSDIEWRLRRESLEFNKLSKSREQDARQLANWISSMCDVIGIENLVKKNNFFGGSGKREPGWDNFYKPKKENRWWINAIHKALTELSQNKGKRVILLPAMRTSITCPKCKYCDSKNRNGEKFNCLKCGIELNADIDVATENLATVAITAQSMPKPTCERSGDAKKPVRARKAKAPEFHDKLAPSYTVVLREAV

SEQ ID NO: 204 - protein, 704 aa, synthetic construct
MIKPTVSQFLTPGFKLIRNHSRTAGLKLKNEGEEACKKFVRENEIPKDECPNFQGGPAIANIIAKSREFTEWEIYQSSLAIQEVIFTLPKDKLPEPILKEEWRAQWLSEHGLDTVPYKEAAGLNLIIKNAVNTYKGVQVKVDNKNKNNLAKINRKNEIAKLNGEQEISFEEIKAFDDKGYLLQKPSPNKSIYCYQSVSPKPFITSKYHNVNLPEEYIGYYRKSNEPIVSPYQFDRLRIPIGEPGYVPKWQYTFLSKKENKRRKLSKRIKNVSPILGIICIKKDWCVFDMRGLLRTNHWKKYHKPTDSINDLFDYFTGDPVIDTKANVVRFRYKMENGIVNYKPVREKKGKELLENICDQNGSCKLATVDVGQNNPVAIGLFELKKVNGELTKTLISRHPTPIDFCNKITAYRERYDKLESSIKLDAIKQLTSEQKIEVDNYNNNFTPQNTKQIVCSKLNINPNDLPWDKMISGTHFISEKAQVSNKSEGSSGDYKWFQDYKPKLSKEVRDALSDIEWRLRRESLEFNKLSKSREQDARQLANWISSMCDVIGIENLVKKNNFFGGSGKREPGWDNFYKPKKENRWWINAIHKALTELSQNKGKRVILLPAMRTSITCPKCKYCDSKNRNGEKFNCLKCGIELNADIDVATENLATVAITAQSMPKPTCERSGDAKKPVRARKAKAPEFHDKLAPSYTVVLREAV

SEQ ID NO: 205 - protein, 36 aa, synthetic construct
SDLYIERGGDPRDVHQQVETKPKGKRKSEIRILKIR

SEQ ID NO: 206 - protein, 31 aa, synthetic construct
SDYIVDHGGDPEKVFFETKSKKDKTKRYKRR

SEQ ID NO: 207 - RNA, 17 nt, synthetic construct
  source 1..17: mol_type = other RNA
gtgggactgggctgggg

SEQ ID NO: 208 - RNA, 17 nt, synthetic construct
  source 1..17: mol_type = other RNA
gagcaacggcggaaggt

SEQ ID NO: 209 - RNA, 20 nt, synthetic construct
  source 1..20: mol_type = other RNA
cctagaggcagctgctccag

SEQ ID NO: 210 - RNA, 20 nt, synthetic construct
  source 1..20: mol_type = other RNA
catccctagaggcagctgct

SEQ ID NO: 211 - RNA, 20 nt, synthetic construct
  source 1..20: mol_type = other RNA
atccctagaggcagctgctc

SEQ ID NO: 212 - RNA, 20 nt, synthetic construct
  source 1..20: mol_type = other RNA
ggttgcttaaaagggacagt

SEQ ID NO: 213 - RNA, 20 nt, synthetic construct
  source 1..20: mol_type = other RNA
agcaacctacaggggcagcc

SEQ ID NO: 214 - RNA, 20 nt, synthetic construct
  source 1..20: mol_type = other RNA
cagccccgggtactccttgt

SEQ ID NO: 215 - RNA, 20 nt, synthetic construct
  source 1..20: mol_type = other RNA
ccaggtggcccagcaggcca

SEQ ID NO: 216 - RNA, 20 nt, synthetic construct
  source 1..20: mol_type = other RNA
caggagtcccaggtggccca

SEQ ID NO: 217 - RNA, 20 nt, synthetic construct
  source 1..20: mol_type = other RNA
agtgcatccttggcggtctt

SEQ ID NO: 218 - RNA, 20 nt, synthetic construct
  source 1..20: mol_type = other RNA
ctgggccacctgggactcct

SEQ ID NO: 219 - RNA, 20 nt, synthetic construct
  source 1..20: mol_type = other RNA
catccttggcggtcttggtg

SEQ ID NO: 220 - RNA, 20 nt, synthetic construct
  source 1..20: mol_type = other RNA
ggtgaccgatggcttcagtt

SEQ ID NO: 221 - RNA, 20 nt, synthetic construct
  source 1..20: mol_type = other RNA
cccctgtaggttgcttaaaa

SEQ ID NO: 222 - RNA, 20 nt, synthetic construct
  source 1..20: mol_type = other RNA
gagcaccgttaaggacaagt

SEQ ID NO: 223 - RNA, 20 nt, synthetic construct
  source 1..20: mol_type = other RNA
gcttcagttccctgaaagac

SEQ ID NO: 224 - RNA, 20 nt, synthetic construct
  source 1..20: mol_type = other RNA
agacctcaataccccaagtc

SEQ ID NO: 225 - RNA, 20 nt, synthetic construct
  source 1..20: mol_type = other RNA
cttaaaagggacagtattct

SEQ ID NO: 226 - RNA, 20 nt, synthetic construct
  source 1..20: mol_type = other RNA
aagctggacaagaagctgct

SEQ ID NO: 227 - RNA, 20 nt, synthetic construct
  source 1..20: mol_type = other RNA
cctgagacctcaatacccca

SEQ ID NO: 228 - RNA, 20 nt, synthetic construct
  source 1..20: mol_type = other RNA
accgatggcttcagttccct

SEQ ID NO: 229 - RNA, 20 nt, synthetic construct
  source 1..20: mol_type = other RNA
aaagggacagtattctcagt

SEQ ID NO: 230 - RNA, 20 nt, synthetic construct
  source 1..20: mol_type = other RNA
aagccatcggtcacccagcc

SEQ ID NO: 231 - RNA, 20 nt, synthetic construct
  source 1..20: mol_type = other RNA
tcccttttaagcaacctaca

SEQ ID NO: 232 - RNA, 20 nt, synthetic construct
  source 1..20: mol_type = other RNA
tccttaacggtgctccagta

SEQ ID NO: 233 - RNA, 20 nt, synthetic construct
  source 1..20: mol_type = other RNA
agaatactgtcccttttaag

SEQ ID NO: 234 - RNA, 20 nt, synthetic construct
  source 1..20: mol_type = other RNA
cctggaggggggccaggcat

SEQ ID NO: 235 - RNA, 20 nt, synthetic construct
  source 1..20: mol_type = other RNA
acggtgctccagtagtcttt

SEQ ID NO: 236 - RNA, 20 nt, synthetic construct
  source 1..20: mol_type = other RNA
gcagcttcttgtccagcttt

SEQ ID NO: 237 - RNA, 20 nt, synthetic construct
  source 1..20: mol_type = other RNA
gtctttcagggaactgaagc

SEQ ID NO: 238 - RNA, 20 nt, synthetic construct
  source 1..20: mol_type = other RNA
gggtattgaggtctcaggca

SEQ ID NO: 239 - RNA, 20 nt, synthetic construct
  source 1..20: mol_type = other RNA
ctccagtagtctttcaggga

SEQ ID NO: 240 - RNA, 20 nt, synthetic construct
  source 1..20: mol_type = other RNA
gacttggggtattgaggtct

SEQ ID NO: 241 - RNA, 20 nt, synthetic construct
  source 1..20: mol_type = other RNA
ctgtcccttttaagcaacct

SEQ ID NO: 242 - RNA, 20 nt, synthetic construct
  source 1..20: mol_type = other RNA
ccctgaaagactactggagc

SEQ ID NO: 243 - RNA, 20 nt, synthetic construct
  source 1..20: mol_type = other RNA
taggttgcttaaaagggaca

SEQ ID NO: 244 - RNA, 20 nt, synthetic construct
  source 1..20: mol_type = other RNA
cctgaaagactactggagca

SEQ ID NO: 245 - RNA, 20 nt, synthetic construct
  source 1..20: mol_type = other RNA
ctggagcaccgttaaggaca

SEQ ID NO: 246 - RNA, 20 nt, synthetic construct
  source 1..20: mol_type = other RNA
aaagactactggagcaccgt

SEQ ID NO: 247 - RNA, 20 nt, synthetic construct
  source 1..20: mol_type = other RNA
gcttaaaagggacagtattc

SEQ ID NO: 248 - RNA, 20 nt, synthetic construct
  source 1..20: mol_type = other RNA
agttccctgaaagactactg

SEQ ID NO: 249 - RNA, 20 nt, synthetic construct
  source 1..20: mol_type = other RNA
cagttccctgaaagactact

SEQ ID NO: 250 - RNA, 20 nt, synthetic construct
  source 1..20: mol_type = other RNA
aataccccaagtccacctgc

SEQ ID NO: 251 - RNA, 20 nt, synthetic construct
  source 1..20: mol_type = other RNA
atgcctggcccccctccagg

SEQ ID NO: 252 - RNA, 20 nt, synthetic construct
  source 1..20: mol_type = other RNA
cagggctgcccctgtaggtt

SEQ ID NO: 253 - RNA, 20 nt, synthetic construct
  source 1..20: mol_type = other RNA
aaaagggacagtattctcag

SEQ ID NO: 254 - RNA, 20 nt, synthetic construct
  source 1..20: mol_type = other RNA
ccaataaagctggacaagaa

SEQ ID NO: 255 - RNA, 20 nt, synthetic construct
  source 1..20: mol_type = other RNA
agggaactgaagccatcggt

SEQ ID NO: 256 - RNA, 20 nt, synthetic construct
  source 1..20: mol_type = other RNA
ttaagcaacctacaggggca

SEQ ID NO: 257 - RNA, 20 nt, synthetic construct
  source 1..20: mol_type = other RNA
cttgtccagctttattggga

SEQ ID NO: 258 - RNA, 20 nt, synthetic construct
  source 1..20: mol_type = other RNA
ccttttaagcaacctacagg

SEQ ID NO: 259 - RNA, 20 nt, synthetic construct
  source 1..20: mol_type = other RNA
tttcagggaactgaagccat

SEQ ID NO: 260 - RNA, 20 nt, synthetic construct
  source 1..20: mol_type = other RNA
cttaacggtgctccagtagt

SEQ ID NO: 261 - RNA, 20 nt, synthetic construct
  source 1..20: mol_type = other RNA
cagtagtctttcagggaact

SEQ ID NO: 262 - RNA, 20 nt, synthetic construct
  source 1..20: mol_type = other RNA
tcagggaactgaagccatcg

SEQ ID NO: 263 - RNA, 20 nt, synthetic construct
  source 1..20: mol_type = other RNA
aacggtgctccagtagtctt

SEQ ID NO: 264 - RNA, 20 nt, synthetic construct
  source 1..20: mol_type = other RNA
taagcaacctacaggggcag

SEQ ID NO: 265 - RNA, 20 nt, synthetic construct
  source 1..20: mol_type = other RNA
ttgtccagctttattgggag

SEQ ID NO: 266 - RNA, 20 nt, synthetic construct
  source 1..20: mol_type = other RNA
ggggtattgaggtctcaggc

SEQ ID NO: 267 - RNA, 20 nt, synthetic construct
  source 1..20: mol_type = other RNA
cagggaactgaagccatcgg

SEQ ID NO: 268 - RNA, 20 nt, synthetic construct
  source 1..20: mol_type = other RNA
gtccttaacggtgctccagt

SEQ ID NO: 269 - RNA, 20 nt, synthetic construct
  source 1..20: mol_type = other RNA
aagcaacctacaggggcagc

SEQ ID NO: 270 - RNA, 20 nt, synthetic construct
  source 1..20: mol_type = other RNA
gagcagctgcctctagggat

SEQ ID NO: 271 - RNA, 20 nt, synthetic construct
  source 1..20: mol_type = other RNA
cctggagcagctgcctctag

SEQ ID NO: 272 - RNA, 20 nt, synthetic construct
  source 1..20: mol_type = other RNA
acctggagcagctgcctcta

SEQ ID NO: 273 - RNA, 20 nt, synthetic construct
  source 1..20: mol_type = other RNA
cccagagggcattacctgga

SEQ ID NO: 274 - RNA, 20 nt, synthetic construct
  source 1..20: mol_type = other RNA
ccctccccagagggcattac

SEQ ID NO: 275 - RNA, 20 nt, synthetic construct
  source 1..20: mol_type = other RNA
cccctccccagagggcatta

SEQ ID NO: 276 - RNA, 20 nt, synthetic construct
  source 1..20: mol_type = other RNA
tcccctccccagagggcatt

SEQ ID NO: 277 - RNA, 20 nt, synthetic construct
  source 1..20: mol_type = other RNA
tttcccctccccagagggca

SEQ ID NO: 278 - RNA, 20 nt, synthetic construct
  source 1..20: mol_type = other RNA
ctctttcccctccccagagg

SEQ ID NO: 279 - RNA, 20 nt, synthetic construct
  source 1..20: mol_type = other RNA
ccctcctctttcccctcccc

SEQ ID NO: 280 - RNA, 20 nt, synthetic construct
  source 1..20: mol_type = other RNA
ctcccctcctctttcccctc

SEQ ID NO: 281 - RNA, 20 nt, synthetic construct
  source 1..20: mol_type = other RNA
ctctttcctcaggagcttca

SEQ ID NO: 282 - RNA, 20 nt, synthetic construct
  source 1..20: mol_type = other RNA
aagctcctgaggaaagagca

SEQ ID NO: 283 - RNA, 20 nt, synthetic construct
  source 1..20: mol_type = other RNA
agccctgctctttcctcagg

SEQ ID NO: 284 - RNA, 20 nt, synthetic construct
  source 1..20: mol_type = other RNA
tttcctcaggagcttcagag

SEQ ID NO: 285 - RNA, 20 nt, synthetic construct
  source 1..20: mol_type = other RNA
tcctcaggagcttcagaggc

SEQ ID NO: 286 - RNA, 20 nt, synthetic construct
  source 1..20: mol_type = other RNA
cctcaggagcttcagaggcc

SEQ ID NO: 287 - RNA, 20 nt, synthetic construct
  source 1..20: mol_type = other RNA
ctcaggagcttcagaggccg

SEQ ID NO: 288 - RNA, 20 nt, synthetic construct
  source 1..20: mol_type = other RNA
aggagcttcagaggccgagg

SEQ ID NO: 289 - RNA, 20 nt, synthetic construct
  source 1..20: mol_type = other RNA
tgaagctcctgaggaaagag

SEQ ID NO: 290 - RNA, 20 nt, synthetic construct
  source 1..20: mol_type = other RNA
ggcctctgaagctcctgagg

SEQ ID NO: 291 - RNA, 20 nt, synthetic construct
  source 1..20: mol_type = other RNA
ccctgctctgttgcttcccc

SEQ ID NO: 292 - RNA, 20 nt, synthetic construct
  source 1..20: mol_type = other RNA
gcctgctgggccacctggga

SEQ ID NO: 293 - RNA, 20 nt, synthetic construct
  source 1..20: mol_type = other RNA
cctggcctgctgggccacct

SEQ ID NO: 294 - RNA, 20 nt, synthetic construct
  source 1..20: mol_type = other RNA
tacctggcctgctgggccac

SEQ ID NO: 295 - RNA, 20 nt, synthetic construct
  source 1..20: mol_type = other RNA
gggagggaggccagcgggtg

SEQ ID NO: 296 - RNA, 20 nt, synthetic construct
  source 1..20: mol_type = other RNA
cccccagcccagtcccacca

SEQ ID NO: 297 - RNA, 20 nt, synthetic construct
  source 1..20: mol_type = other RNA
ccctgctctgttgcttcccc

SEQ ID NO: 298 - RNA, 20 nt, synthetic construct
  source 1..20: mol_type = other RNA
gcctcagggttcaaatccca

SEQ ID NO: 299 - RNA, 20 nt, synthetic construct
  source 1..20: mol_type = other RNA
gccctgcatgaagccaagaa

SEQ ID NO: 300 - RNA, 20 nt, synthetic construct
  source 1..20: mol_type = other RNA
gaagcgggtcccgtcctcct

SEQ ID NO: 301 - RNA, 20 nt, synthetic construct
  source 1..20: mol_type = other RNA
tctaggagatacacctccac

SEQ ID NO: 302 - RNA, 20 nt, synthetic construct
  source 1..20: mol_type = other RNA
accatgaccctgccctcgat

SEQ ID NO: 303 - RNA, 20 nt, synthetic construct
  source 1..20: mol_type = other RNA
accctgccctcgatttcccg

SEQ ID NO: 304 - RNA, 20 nt, synthetic construct
  source 1..20: mol_type = other RNA
ccctcgatttcccggtggtc

SEQ ID NO: 305 - RNA, 20 nt, synthetic construct
  source 1..20: mol_type = other RNA
tatgctggtgtctaggagat

SEQ ID NO: 306 - RNA, 20 nt, synthetic construct
  source 1..20: mol_type = other RNA
tgctggtgtctaggagatac

SEQ ID NO: 307 - RNA, 20 nt, synthetic construct
  source 1..20: mol_type = other RNA
gtcactctgtatgctggtgt

SEQ ID NO: 308 - RNA, 20 nt, synthetic construct
  source 1..20: mol_type = other RNA
tggaagcgggtcccgtcctc

SEQ ID NO: 309 - RNA, 20 nt, synthetic construct
  source 1..20: mol_type = other RNA
ctggtgtctaggagatacac

SEQ ID NO: 310 - RNA, 20 nt, synthetic construct
  source 1..20: mol_type = other RNA
ggagatacacctccaccagg

SEQ ID NO: 311 - RNA, 20 nt, synthetic construct
  source 1..20: mol_type = other RNA
gtgtctaggagatacacctc

SEQ ID NO: 312 - RNA, 20 nt, synthetic construct
  source 1..20: mol_type = other RNA
cacctccaccaggctgcctc

SEQ ID NO: 313 - RNA, 20 nt, synthetic construct
  source 1..20: mol_type = other RNA
gacaccagcatacagagtga

SEQ ID NO: 314 - RNA, 20 nt, synthetic construct
  source 1..20: mol_type = other RNA
tgcccgaggaggacgggacc

SEQ ID NO: 315 - RNA, 20 nt, synthetic construct
  source 1..20: mol_type = other RNA
gtggaggtgtatctcctaga

SEQ ID NO: 316 - RNA, 20 nt, synthetic construct
  source 1..20: mol_type = other RNA
tctcctagacaccagcatac

SEQ ID NO: 317 - RNA, 20 nt, synthetic construct
  source 1..20: mol_type = other RNA
cagagtgaccaccgggaaat

SEQ ID NO: 318 - RNA, 20 nt, synthetic construct
  source 1..20: mol_type = other RNA
tatctcctagacaccagcat

SEQ ID NO: 319 - RNA, 20 nt, synthetic construct
  source 1..20: mol_type = other RNA
accaccgggaaatcgagggc

SEQ ID NO: 320 - RNA, 20 nt, synthetic construct
  source 1..20: mol_type = other RNA
gaggtgtatctcctagacac

SEQ ID NO: 321 - RNA, 20 nt, synthetic construct
  source 1..20: mol_type = other RNA
cccgaggaggacgggacccg

SEQ ID NO: 322 - RNA, 20 nt, synthetic construct
  source 1..20: mol_type = other RNA
cccttcccttggcagttgag

SEQ ID NO: 323 - RNA, 20 nt, synthetic construct
  source 1..20: mol_type = other RNA
gcagttgagcacgcgcaggc

SEQ ID NO: 324 - RNA, 20 nt, synthetic construct
  source 1..20: mol_type = other RNA
accgtgcccttcccttggca

SEQ ID NO: 325 - RNA, 20 nt, synthetic construct
  source 1..20: mol_type = other RNA
gccacgccggcatcccggcc

SEQ ID NO: 326 - RNA, 20 nt, synthetic construct
  source 1..20: mol_type = other RNA
accacccctgccaggtgggt

SEQ ID NO: 327 - RNA, 20 nt, synthetic construct
  source 1..20: mol_type = other RNA
gcaggggtggtcagcggccg

SEQ ID NO: 328 - RNA, 20 nt, synthetic construct
  source 1..20: mol_type = other RNA
ctcaactgccaagggaaggg

SEQ ID NO: 329 - RNA, 20 nt, synthetic construct
  source 1..20: mol_type = other RNA
gtcagcggccgggatgccgg

SEQ ID NO: 330 - RNA, 20 nt, synthetic construct
  source 1..20: mol_type = other RNA
cgcgtgctcaactgccaagg

SEQ ID NO: 331 - RNA, 20 nt, synthetic construct
  source 1..20: mol_type = other RNA
gcacccacctggcaggggtg

SEQ ID NO: 332 - RNA, 20 nt, synthetic construct
  source 1..20: mol_type = other RNA
ccggcagcggtgaccagcac

SEQ ID NO: 333 - RNA, 20 nt, synthetic construct
  source 1..20: mol_type = other RNA
gcttttccgaataaactcca

SEQ ID NO: 334 - RNA, 20 nt, synthetic construct
  source 1..20: mol_type = other RNA
tacccacccgccaggggcag

SEQ ID NO: 335 - RNA, 20 nt, synthetic construct
  source 1..20: mol_type = other RNA
gaccagctggcttttccgaa

SEQ ID NO: 336 - RNA, 20 nt, synthetic construct
  source 1..20: mol_type = other RNA
cccacccgccaggggcagca

SEQ ID NO: 337 - RNA, 20 nt, synthetic construct
  source 1..20: mol_type = other RNA
gggagtagaggcaggcatcg

SEQ ID NO: 338 - RNA, 20 nt, synthetic construct
  source 1..20: mol_type = other RNA
accagcacgaccccagccct

SEQ ID NO: 339 - RNA, 20 nt, synthetic construct
  source 1..20: mol_type = other RNA
gaggcaggcatcgtcccgga

SEQ ID NO: 340 - RNA, 20 nt, synthetic construct
  source 1..20: mol_type = other RNA
cccctggcgggtgggtacag

SEQ ID NO: 341 - RNA, 20 nt, synthetic construct
  source 1..20: mol_type = other RNA
gggtcgtgctggtcaccgct

SEQ ID NO: 342 - RNA, 20 nt, synthetic construct
  source 1..20: mol_type = other RNA
ctggtcaccgctgccggcaa

SEQ ID NO: 343 - RNA, 20 nt, synthetic construct
  source 1..20: mol_type = other RNA
gtcaccgctgccggcaactt

SEQ ID NO: 344 - RNA, 20 nt, synthetic construct
  source 1..20: mol_type = other RNA
ctgcccctggcgggtgggta

SEQ ID NO: 345 - RNA, 20 nt, synthetic construct
  source 1..20: mol_type = other RNA
gagtttattcggaaaagcca

SEQ ID NO: 346 - RNA, 20 nt, synthetic construct
  source 1..20: mol_type = other RNA
gcgagggctggggtcgtgct

SEQ ID NO: 347 - RNA, 20 nt, synthetic construct
  source 1..20: mol_type = other RNA
ctgctgcccctggcgggtgg

SEQ ID NO: 348 - RNA, 20 nt, synthetic construct
  source 1..20: mol_type = other RNA
ttcggaaaagccagctggtc

SEQ ID NO: 349 - RNA, 20 nt, synthetic construct
  source 1..20: mol_type = other RNA
cctgcctctactccccagcc

SEQ ID NO: 350 - RNA, 20 nt, synthetic construct
  source 1..20: mol_type = other RNA
ccagcgcctggcgagggctg

SEQ ID NO: 351 - RNA, 20 nt, synthetic construct
  source 1..20: mol_type = other RNA
ccggcaacttccgggacgat

SEQ ID NO: 352 - RNA, 20 nt, synthetic construct
  source 1..20: mol_type = other RNA
tcctcccctggggcaaagag

SEQ ID NO: 353 - RNA, 20 nt, synthetic construct
  source 1..20: mol_type = other RNA
gaggcaccaatgatgtcctc

SEQ ID NO: 354 - RNA, 20 nt, synthetic construct
  source 1..20: mol_type = other RNA
ggcattggtggccccaactg

SEQ ID NO: 355 - RNA, 20 nt, synthetic construct
  source 1..20: mol_type = other RNA
atgtcctcccctggggcaaa

SEQ ID NO: 356 - RNA, 20 nt, synthetic construct
  source 1..20: mol_type = other RNA
acacaaagcaggtgctgcag

SEQ ID NO: 357 - RNA, 20 nt, synthetic construct
  source 1..20: mol_type = other RNA
gtggccccaactgtgatgac

SEQ ID NO: 358 - RNA, 20 nt, synthetic construct
  source 1..20: mol_type = other RNA
ctgcagtcgctggaggcacc

SEQ ID NO: 359 - RNA, 20 nt, synthetic construct
  source 1..20: mol_type = other RNA
cagtcgctggaggcaccaat

SEQ ID NO: 360 - RNA, 20 nt, synthetic construct
  source 1..20: mol_type = other RNA
gtccccaaagtccccagggt

SEQ ID NO: 361 - RNA, 20 nt, synthetic construct
  source 1..20: mol_type = other RNA
gggcaaagaggtccacacag

SEQ ID NO: 362 - RNA, 20 nt, synthetic construct
  source 1..20: mol_type = other RNA
gtgcctccagcgactgcagc

SEQ ID NO: 363 - RNA, 20 nt, synthetic construct
  source 1..20: mol_type = other RNA
cctccagcgactgcagcacc

SEQ ID NO: 364 - RNA, 20 nt, synthetic construct
  source 1..20: mol_type = other RNA
gccgctgtgtggacctcttt

SEQ ID NO: 365 - RNA, 20 nt, synthetic construct
  source 1..20: mol_type = other RNA
gacctctttgccccagggga

SEQ ID NO: 366 - RNA, 20 nt, synthetic construct
  source 1..20: mol_type = other RNA
accctggggactttggggac

SEQ ID NO: 367 - RNA, 20 nt, synthetic construct
  source 1..20: mol_type = other RNA
tggacctctttgccccaggg

SEQ ID NO: 368 - RNA, 20 nt, synthetic construct
  source 1..20: mol_type = other RNA
cagcacctgctttgtgtcac

SEQ ID NO: 369 - RNA, 20 nt, synthetic construct
  source 1..20: mol_type = other RNA
gggaccaactttggccgctg

SEQ ID NO: 370 - RNA, 20 nt, synthetic construct
  source 1..20: mol_type = other RNA
gggactttggggaccaactt

SEQ ID NO: 371 - RNA, 20 nt, synthetic construct
  source 1..20: mol_type = other RNA
tgtggacctctttgccccag

SEQ ID NO: 372 - RNA, 20 nt, synthetic construct
  source 1..20: mol_type = other RNA
ccccaggggaggacatcatt

SEQ ID NO: 373 - RNA, 20 nt, synthetic construct
  source 1..20: mol_type = other RNA
gatcagtctctgcctcaact

SEQ ID NO: 374 - RNA, 20 nt, synthetic construct
  source 1..20: mol_type = other RNA
gcagagaagtggatcagtct

SEQ ID NO: 375 - RNA, 20 nt, synthetic construct
  source 1..20: mol_type = other RNA
agctccggctcggcagacag

SEQ ID NO: 376 - RNA, 20 nt, synthetic construct
  source 1..20: mol_type = other RNA
gtcctcagggaaccaggcct

SEQ ID NO: 377 - RNA, 20 nt, synthetic construct
  source 1..20: mol_type = other RNA
atgacatctttggcagagaa

SEQ ID NO: 378 - RNA, 20 nt, synthetic construct
  source 1..20: mol_type = other RNA
acatctttggcagagaagtg

SEQ ID NO: 379 - RNA, 20 nt, synthetic construct
  source 1..20: mol_type = other RNA
ctgtctgccgagccggagct

SEQ ID NO: 380 - RNA, 20 nt, synthetic construct
  source 1..20: mol_type = other RNA
cagccatgatgctgtctgcc

SEQ ID NO: 381 - RNA, 20 nt, synthetic construct
  source 1..20: mol_type = other RNA
atccacttctctgccaaaga

SEQ ID NO: 382 - RNA, 20 nt, synthetic construct
  source 1..20: mol_type = other RNA
aggcctggttccctgaggac

SEQ ID NO: 383 - RNA, 20 nt, synthetic construct
  source 1..20: mol_type = other RNA
atgctgtctgccgagccgga

SEQ ID NO: 384 - RNA, 20 nt, synthetic construct
  source 1..20: mol_type = other RNA
aggcagagactgatccactt

SEQ ID NO: 385 - RNA, 20 nt, synthetic construct
  source 1..20: mol_type = other RNA
ccaaagatgtcatcaatgag

SEQ ID NO: 386 - RNA, 20 nt, synthetic construct
  source 1..20: mol_type = other RNA
tctgccgagccggagctcac

SEQ ID NO: 387 - RNA, 20 nt, synthetic construct
  source 1..20: mol_type = other RNA
gccgagttgaggcagagact

SEQ ID NO: 388 - RNA, 20 nt, synthetic construct
  source 1..20: mol_type = other RNA
tcatcaatgaggcctggttc

SEQ ID NO: 389 - RNA, 20 nt, synthetic construct
  source 1..20: mol_type = other RNA
tggccatccgtgtaggcccc

SEQ ID NO: 390 - RNA, 20 nt, synthetic construct
  source 1..20: mol_type = other RNA
gagcagctcagcagctcctc

SEQ ID NO: 391 - RNA, 20 nt, synthetic construct
  source 1..20: mol_type = other RNA
cgctcgccccgccgcttccc

SEQ ID NO: 392 - RNA, 20 nt, synthetic construct
  source 1..20: mol_type = other RNA
gagaaactggagcagctcag

SEQ ID NO: 393 - RNA, 20 nt, synthetic construct
  source 1..20: mol_type = other RNA
gccatccgtgtaggccccga

SEQ ID NO: 394 - RNA, 20 nt, synthetic construct
  source 1..20: mol_type = other RNA
taggccccgagtgtgctgac

SEQ ID NO: 395 - RNA, 20 nt, synthetic construct
  source 1..20: mol_type = other RNA
ggccccgagtgtgctgacca

SEQ ID NO: 396 - RNA, 20 nt, synthetic construct
  source 1..20: mol_type = other RNA
ggaagcggcggggcgagcgc

SEQ ID NO: 397 - RNA, 20 nt, synthetic construct
  source 1..20: mol_type = other RNA
ctgagctgctccagtttctc

SEQ ID NO: 398 - RNA, 20 nt, synthetic construct
  source 1..20: mol_type = other RNA
tggtcagcacactcggggcc

SEQ ID NO: 399 - RNA, 20 nt, synthetic construct
  source 1..20: mol_type = other RNA
ctccagtttctccaggagtg

SEQ ID NO: 400 - RNA, 20 nt, synthetic construct
  source 1..20: mol_type = other RNA
gcagctgttttgcaggactg

SEQ ID NO: 401 - RNA, 20 nt, synthetic construct
  source 1..20: mol_type = other RNA
aggagctgctgagctgctcc

SEQ ID NO: 402 - RNA, 20 nt, synthetic construct
  source 1..20: mol_type = other RNA
agctgctccagtttctccag

SEQ ID NO: 403 - RNA, 20 nt, synthetic construct
  source 1..20: mol_type = other RNA
gtcagcacactcggggccta

SEQ ID NO: 404 - RNA, 20 nt, synthetic construct
  source 1..20: mol_type = other RNA
gagctgtgtggacgctgcag

SEQ ID NO: 405 - RNA, 20 nt, synthetic construct
  source 1..20: mol_type = other RNA
gcagtggacacgggtcccca

SEQ ID NO: 406 - RNA, 20 nt, synthetic construct
  source 1..20: mol_type = other RNA
gcgtagacaccctcaccccc

SEQ ID NO: 407 - RNA, 20 nt, synthetic construct
  source 1..20: mol_type = other RNA
gacaccctcacccccaaaag

SEQ ID NO: 408 - RNA, 20 nt, synthetic construct
  source 1..20: mol_type = other RNA
gacacgggtccccatgctgg

SEQ ID NO: 409 - RNA, 20 nt, synthetic construct
  source 1..20: mol_type = other RNA
gggtagcaggcagcacctgg

SEQ ID NO: 410 - RNA, 20 nt, synthetic construct
  source 1..20: mol_type = other RNA
gcaggcagcacctggcaatg

SEQ ID NO: 411 - RNA, 20 nt, synthetic construct
  source 1..20: mol_type = other RNA
gtggagctgtgtggacgctg

SEQ ID NO: 412 - RNA, 20 nt, synthetic construct
  source 1..20: mol_type = other RNA
gcaatggcgtagacaccctc

SEQ ID NO: 413 - RNA, 20 nt, synthetic construct
  source 1..20: mol_type = other RNA
ccaggtgctgcctgctaccc

SEQ ID NO: 414 - RNA, 20 nt, synthetic construct
  source 1..20: mol_type = other RNA
ggggtgagggtgtctacgcc

SEQ ID NO: 415 - RNA, 20 nt, synthetic construct
  source 1..20: mol_type = other RNA
cgccattgccaggtgctgcc

SEQ ID NO: 416 - RNA, 20 nt, synthetic construct
  source 1..20: mol_type = other RNA
agggtgtctacgccattgcc

SEQ ID NO: 417 - RNA, 20 nt, synthetic construct
  source 1..20: mol_type = other RNA
tctacgccattgccaggtgc

SEQ ID NO: 418 - RNA, 20 nt, synthetic construct
  source 1..20: mol_type = other RNA
ccgggcccacaacgcttttg

SEQ ID NO: 419 - RNA, 20 nt, synthetic construct
  source 1..20: mol_type = other RNA
cagcgtccacacagctccac

SEQ ID NO: 420 - RNA, 20 nt, synthetic construct
  source 1..20: mol_type = other RNA
gggacccgtgtccactgcca

SEQ ID NO: 421 - RNA, 20 nt, synthetic construct
  source 1..20: mol_type = other RNA
tgggtgccaaggtcctccac

SEQ ID NO: 422 - RNA, 20 nt, synthetic construct
  source 1..20: mol_type = other RNA
ccaaggtcctccacctccca

SEQ ID NO: 423 - RNA, 20 nt, synthetic construct
  source 1..20: mol_type = other RNA
actttgcattccagacctgg

SEQ ID NO: 424 - RNA, 20 nt, synthetic construct
  source 1..20: mol_type = other RNA
gcagcaggaagcgtggatgc

SEQ ID NO: 425 - RNA, 20 nt, synthetic construct
  source 1..20: mol_type = other RNA
ggctgacctcgtggcctcag

SEQ ID NO: 426 - RNA, 20 nt, synthetic construct
  source 1..20: mol_type = other RNA
gcctcagcacaggcggcttg

SEQ ID NO: 427 - RNA, 20 nt, synthetic construct
  source 1..20: mol_type = other RNA
acctcgtggcctcagcacag

SEQ ID NO: 428 - RNA, 20 nt, synthetic construct
  source 1..20: mol_type = other RNA
ctccttgactttgcattcca

SEQ ID NO: 429 - RNA, 20 nt, synthetic construct
  source 1..20: mol_type = other RNA
cattccagacctggggcatg

SEQ ID NO: 430 - RNA, 20 nt, synthetic construct
  source 1..20: mol_type = other RNA
ggtgccaaggtcctccacct

SEQ ID NO: 431 - RNA, 20 nt, synthetic construct
  source 1..20: mol_type = other RNA
gttgggctgacctcgtggcc

SEQ ID NO: 432 - RNA, 20 nt, synthetic construct
  source 1..20: mol_type = other RNA
gggcatggcagcaggaagcg

SEQ ID NO: 433 - RNA, 20 nt, synthetic construct
  source 1..20: mol_type = other RNA
aggggccgggattccatgct

SEQ ID NO: 434 - RNA, 20 nt, synthetic construct
  source 1..20: mol_type = other RNA
tgctgaggccacgaggtcag

SEQ ID NO: 435 - RNA, 20 nt, synthetic construct
  source 1..20: mol_type = other RNA
gcacccacaagccgcctgtg

SEQ ID NO: 436 - RNA, 20 nt, synthetic construct
  source 1..20: mol_type = other RNA
ccccaggtctggaatgcaaa

SEQ ID NO: 437 - RNA, 20 nt, synthetic construct
  source 1..20: mol_type = other RNA
gaggaccttggcacccacaa

SEQ ID NO: 438 - RNA, 20 nt, synthetic construct
  source 1..20: mol_type = other RNA
ctgaggccacgaggtcagcc

SEQ ID NO: 439 - RNA, 20 nt, synthetic construct
  source 1..20: mol_type = other RNA
gaatgcaaagtcaaggagca

SEQ ID NO: 440 - RNA, 20 nt, synthetic construct
  source 1..20: mol_type = other RNA
ccatgccccaggtctggaat

SEQ ID NO: 441 - RNA, 20 nt, synthetic construct
  source 1..20: mol_type = other RNA
ctgccatgccccaggtctgg

SEQ ID NO: 442 - RNA, 20 nt, synthetic construct
  source 1..20: mol_type = other RNA
ggaggtggaggaccttggca

SEQ ID NO: 443 - RNA, 20 nt, synthetic construct
  source 1..20: mol_type = other RNA
aggccacgaggtcagcccaa

SEQ ID NO: 444 - RNA, 20 nt, synthetic construct
  source 1..20: mol_type = other RNA
caaagtcaaggagcatggaa

SEQ ID NO: 445 - RNA, 20 nt, synthetic construct
  source 1..20: mol_type = other RNA
cagctcccactgggaggtgg

SEQ ID NO: 446 - RNA, 20 nt, synthetic construct
  source 1..20: mol_type = other RNA
gaatcccggcccctcaggag

SEQ ID NO: 447 - RNA, 20 nt, synthetic construct
  source 1..20: mol_type = other RNA
gctgtaaaaaggcaacagag

SEQ ID NO: 448 - RNA, 20 nt, synthetic construct
  source 1..20: mol_type = other RNA
caaaagcaaaacaggtctag

SEQ ID NO: 449 - RNA, 20 nt, synthetic construct
  source 1..20: mol_type = other RNA
aatgtctgcttgcttgggtg

SEQ ID NO: 450 - RNA, 20 nt, synthetic construct
  source 1..20: mol_type = other RNA
aaaatgctacaaaacccaga

SEQ ID NO: 451 - RNA, 20 nt, synthetic construct
  source 1..20: mol_type = other RNA
cttgcttgggtggggctggt

SEQ ID NO: 452 - RNA, 20 nt, synthetic construct
  source 1..20: mol_type = other RNA
ctacaaaacccagaataaat

SEQ ID NO: 453 - RNA, 20 nt, synthetic construct
  source 1..20: mol_type = other RNA
tctgcttgcttgggtggggc

SEQ ID NO: 454 - RNA, 20 nt, synthetic construct
  source 1..20: mol_type = other RNA
ggtggggctggtgctcaagg

SEQ ID NO: 455 - RNA, 20 nt, synthetic construct
  source 1..20: mol_type = other RNA
aaaaggcaacagagaggaca

SEQ ID NO: 456 - RNA, 20 nt, synthetic construct
  source 1..20: mol_type = other RNA
ataaaaatgctacaaaaccc

SEQ ID NO: 457 - RNA, 20 nt, synthetic construct
  source 1..20: mol_type = other RNA
gtctgtgttccccttcccag

SEQ ID NO: 458 - RNA, 20 nt, synthetic construct
  source 1..20: mol_type = other RNA
ttccccttcccagcctcact

SEQ ID NO: 459 - RNA, 20 nt, synthetic construct
  source 1..20: mol_type = other RNA
taaaaaggcaacagagagga

SEQ ID NO: 460 - RNA, 20 nt, synthetic construct
  source 1..20: mol_type = other RNA
tcttcaagttacaaaagcaa

SEQ ID NO: 461 - RNA, 20 nt, synthetic construct
  source 1..20: mol_type = other RNA
gtgctcaaggagggacagtt

SEQ ID NO: 462 - RNA, 20 nt, synthetic construct
  source 1..20: mol_type = other RNA
gggctggtgctcaaggaggg

SEQ ID NO: 463 - RNA, 20 nt, synthetic construct
  source 1..20: mol_type = other RNA
cttgggtggggctggtgctc

SEQ ID NO: 464 - RNA, 20 nt, synthetic construct
  source 1..20: mol_type = other RNA
caaaacccagaataaatatc

SEQ ID NO: 465 - RNA, 20 nt, synthetic construct
  source 1..20: mol_type = other RNA
tgttccccttcccagcctca

SEQ ID NO: 466 - RNA, 20 nt, synthetic construct
  source 1..20: mol_type = other RNA
gacctgttttgcttttgtaa

SEQ ID NO: 467 - RNA, 20 nt, synthetic construct
  source 1..20: mol_type = other RNA
cttttgtaacttgaagatat

SEQ ID NO: 468 - RNA, 20 nt, synthetic construct
  source 1..20: mol_type = other RNA
tcctctctgttgccttttta

SEQ ID NO: 469 - RNA, 20 nt, synthetic construct
  source 1..20: mol_type = other RNA
ggtctgtcctctctgttgcc

SEQ ID NO: 470 - RNA, 20 nt, synthetic construct
  source 1..20: mol_type = other RNA
ttctgggttttgtagcattt

SEQ ID NO: 471 - RNA, 20 nt, synthetic construct
  source 1..20: mol_type = other RNA
tccctccttgagcaccagcc

SEQ ID NO: 472 - RNA, 20 nt, synthetic construct
  source 1..20: mol_type = other RNA
aagatatttattctgggttt

SEQ ID NO: 473 - RNA, 20 nt, synthetic construct
  source 1..20: mol_type = other RNA
tttattctgggttttgtagc

SEQ ID NO: 474 - RNA, 20 nt, synthetic construct
  source 1..20: mol_type = other RNA
acttgaagatatttattctg

SEQ ID NO: 475 - RNA, 20 nt, synthetic construct
  source 1..20: mol_type = other RNA
aggctgggaaggggaacaca

SEQ ID NO: 476 - RNA, 20 nt, synthetic construct
  source 1..20: mol_type = other RNA
tcttttgggtctgtcctctc

SEQ ID NO: 477 - RNA, 20 nt, synthetic construct
  source 1..20: mol_type = other RNA
ttttgcttttgtaacttgaa

SEQ ID NO: 478 - RNA, 20 nt, synthetic construct
  source 1..20: mol_type = other RNA
ggttttgtagcatttttatt

SEQ ID NO: 479 - RNA, 20 nt, synthetic construct
  source 1..20: mol_type = other RNA
agcaccagccccacccaagc

SEQ ID NO: 480 - RNA, 20 nt, synthetic construct
  source 1..20: mol_type = other RNA
ggaaggggaacacagaccag

SEQ ID NO: 481 - RNA, 20 nt, synthetic construct
  source 1..20: mol_type = other RNA
ccggctccggcagcagatgg

SEQ ID NO: 482 - RNA, 20 nt, synthetic construct
  source 1..20: mol_type = other RNA
ggaggtcccagggagggcac

SEQ ID NO: 483 - RNA, 20 nt, synthetic construct
  source 1..20: mol_type = other RNA
ggatggggctgtcactggag

SEQ ID NO: 484 - RNA, 20 nt, synthetic construct
  source 1..20: mol_type = other RNA
cagtgccctccctgggacct

SEQ ID NO: 485 - RNA, 20 nt, synthetic construct
  source 1..20: mol_type = other RNA
ccatctgctgccggagccgg

SEQ ID NO: 486 - RNA, 20 nt, synthetic construct
  source 1..20: mol_type = other RNA
acagccccatcccaggatgg

SEQ ID NO: 487 - RNA, 20 nt, synthetic construct
  source 1..20: mol_type = other RNA
ctgccggagccggcacctgg

SEQ ID NO: 488 - RNA, 13 nt, synthetic construct
  source 1..13: mol_type = other RNA
aaggatgccaaac

SEQ ID NO: 489 - RNA, 52 nt, synthetic construct
  source 1..52: mol_type = other RNA
acagcttatttggaagctgaaatgtgaggtttataacactcacaagaatcct

SEQ ID NO: 490 - RNA, 69 nt, synthetic construct
  source 1..69: mol_type = other RNA
acagcttatttggaagctgaaatgtgaggtttataacactcacaagaatcctgaaaaaggatgccaaac

SEQ ID NO: 491 - RNA, 41 nt, synthetic construct
  source 1..41: mol_type = other RNA
atagattgctccttacgaggagacgtgggactgggctgggg

SEQ ID NO: 492 - RNA, 41 nt, synthetic construct
  source 1..41: mol_type = other RNA
atagattgctccttacgaggagacgagcaacggcggaaggt

SEQ ID NO: 493 - RNA, 40 nt, synthetic construct
  source 1..40: mol_type = other RNA
  modified_base 1..3: mod_base = OTHER; note = Bases modified with phosphorothioate linkage
  modified_base 38..40: mod_base = OTHER; note = Bases modified with phosphorothiate linkages
  modified_base 1: mod_base = OTHER; note = 2-O-Methyladenosine
  modified_base 2: mod_base = um
  modified_base 3: mod_base = OTHER; note = 2-O-Methyladenosine
  modified_base 38: mod_base = gm
  modified_base 39: mod_base = gm
  modified_base 40: mod_base = um
atagattgctccttacgaggagacgagcaacggcggaggt

SEQ ID NO: 494 - RNA, 89 nt, synthetic construct
  source 1..89: mol_type = other RNA
acagcttatttggaagctgaaatgtgaggtttataacactcacaagaatcctgaaaaaggatgccaaaccctagaggcagctgctccag

SEQ ID NO: 495 - RNA, 89 nt, synthetic construct
  source 1..89: mol_type = other RNA
acagcttatttggaagctgaaatgtgaggtttataacactcacaagaatcctgaaaaaggatgccaaaccatccctagaggcagctgct

SEQ ID NO: 496 - RNA, 89 nt, synthetic construct
  source 1..89: mol_type = other RNA
acagcttatttggaagctgaaatgtgaggtttataacactcacaagaatcctgaaaaaggatgccaaacatccctagaggcagctgctc

SEQ ID NO: 497 - RNA, 89 nt, synthetic construct
  source 1..89: mol_type = other RNA
acagcttatttggaagctgaaatgtgaggtttataacactcacaagaatcctgaaaaaggatgccaaaccagccccgggtactccttgt

SEQ ID NO: 498 - RNA, 89 nt, synthetic construct
  source 1..89: mol_type = other RNA
acagcttatttggaagctgaaatgtgaggtttataacactcacaagaatcctgaaaaaggatgccaaacctgggccacctgggactcct

SEQ ID NO: 499 - RNA, 89 nt, synthetic construct
  source 1..89: mol_type = other RNA
acagcttatttggaagctgaaatgtgaggtttataacactcacaagaatcctgaaaaaggatgccaaaccatccttggcggtcttggtg

SEQ ID NO: 500 - RNA, 89 nt, synthetic construct
  source 1..89: mol_type = other RNA
acagcttatttggaagctgaaatgtgaggtttataacactcacaagaatcctgaaaaaggatgccaaacccaggtggcccagcaggcca

SEQ ID NO: 501 - RNA, 89 nt, synthetic construct
  source 1..89: mol_type = other RNA
acagcttatttggaagctgaaatgtgaggtttataacactcacaagaatcctgaaaaaggatgccaaaccaggagtcccaggtggccca

SEQ ID NO: 502 - RNA, 89 nt, synthetic construct
  source 1..89: mol_type = other RNA
acagcttatttggaagctgaaatgtgaggtttataacactcacaagaatcctgaaaaaggatgccaaacagtgcatccttggcggtctt

SEQ ID NO: 503 - RNA, 89 nt, synthetic construct
  source 1..89: mol_type = other RNA
acagcttatttggaagctgaaatgtgaggtttataacactcacaagaatcctgaaaaaggatgccaaacggttgcttaaaagggacagt

SEQ ID NO: 504 - RNA, 89 nt, synthetic construct
  source 1..89: mol_type = other RNA
acagcttatttggaagctgaaatgtgaggtttataacactcacaagaatcctgaaaaaggatgccaaacagcaacctacaggggcagcc

SEQ ID NO: 505 - RNA, 89 nt, synthetic construct
  source 1..89: mol_type = other RNA
acagcttatttggaagctgaaatgtgaggtttataacactcacaagaatcctgaaaaaggatgccaaacggtgaccgatggcttcagtt

SEQ ID NO: 506 - RNA, 89 nt, synthetic construct
  source 1..89: mol_type = other RNA
acagcttatttggaagctgaaatgtgaggtttataacactcacaagaatcctgaaaaaggatgccaaaccccctgtaggttgcttaaaa

SEQ ID NO: 507 - RNA, 89 nt, synthetic construct
  source 1..89: mol_type = other RNA
acagcttatttggaagctgaaatgtgaggtttataacactcacaagaatcctgaaaaaggatgccaaacgagcaccgttaaggacaagt

SEQ ID NO: 508 - RNA, 89 nt, synthetic construct
  source 1..89: mol_type = other RNA
acagcttatttggaagctgaaatgtgaggtttataacactcacaagaatcctgaaaaaggatgccaaacgcttcagttccctgaaagac

SEQ ID NO: 509 - RNA, 89 nt, synthetic construct
  source 1..89: mol_type = other RNA
acagcttatttggaagctgaaatgtgaggtttataacactcacaagaatcctgaaaaaggatgccaaacagacctcaataccccaagtc

SEQ ID NO: 510 - RNA, 89 nt, synthetic construct
  source 1..89: mol_type = other RNA
acagcttatttggaagctgaaatgtgaggtttataacactcacaagaatcctgaaaaaggatgccaaaccttaaaagggacagtattct

SEQ ID NO: 511 - RNA, 89 nt, synthetic construct
  source 1..89: mol_type = other RNA
acagcttatttggaagctgaaatgtgaggtttataacactcacaagaatcctgaaaaaggatgccaaacaagctggacaagaagctgct

SEQ ID NO: 512 - RNA, 89 nt, synthetic construct
  source 1..89: mol_type = other RNA
acagcttatttggaagctgaaatgtgaggtttataacactcacaagaatcctgaaaaaggatgccaaaccctgagacctcaatacccca

SEQ ID NO: 513 - RNA, 89 nt, synthetic construct
  source 1..89: mol_type = other RNA
acagcttatttggaagctgaaatgtgaggtttataacactcacaagaatcctgaaaaaggatgccaaacaccgatggcttcagttccct

SEQ ID NO: 514 - RNA, 89 nt, synthetic construct
  source 1..89: mol_type = other RNA
acagcttatttggaagctgaaatgtgaggtttataacactcacaagaatcctgaaaaaggatgccaaacaaagggacagtattctcagt

SEQ ID NO: 515 - RNA, 89 nt, synthetic construct
  source 1..89: mol_type = other RNA
acagcttatttggaagctgaaatgtgaggtttataacactcacaagaatcctgaaaaaggatgccaaacaagccatcggtcacccagcc

SEQ ID NO: 516 - RNA, 89 nt, synthetic construct
  source 1..89: mol_type = other RNA
acagcttatttggaagctgaaatgtgaggtttataacactcacaagaatcctgaaaaaggatgccaaactcccttttaagcaacctaca

SEQ ID NO: 517 - RNA, 89 nt, synthetic construct
  source 1..89: mol_type = other RNA
acagcttatttggaagctgaaatgtgaggtttataacactcacaagaatcctgaaaaaggatgccaaactccttaacggtgctccagta

SEQ ID NO: 518 - RNA, 89 nt, synthetic construct
  source 1..89: mol_type = other RNA
acagcttatttggaagctgaaatgtgaggtttataacactcacaagaatcctgaaaaaggatgccaaacagaatactgtcccttttaag

SEQ ID NO: 519 - RNA, 89 nt, synthetic construct
  source 1..89: mol_type = other RNA
acagcttatttggaagctgaaatgtgaggtttataacactcacaagaatcctgaaaaaggatgccaaaccctggaggggggccaggcat

SEQ ID NO: 520 - RNA, 89 nt, synthetic construct
  source 1..89: mol_type = other RNA
acagcttatttggaagctgaaatgtgaggtttataacactcacaagaatcctgaaaaaggatgccaaacacggtgctccagtagtcttt

SEQ ID NO: 521 - RNA, 89 nt, synthetic construct
  source 1..89: mol_type = other RNA
acagcttatttggaagctgaaatgtgaggtttataacactcacaagaatcctgaaaaaggatgccaaacgcagcttcttgtccagcttt

SEQ ID NO: 522 - RNA, 89 nt, synthetic construct
  source 1..89: mol_type = other RNA
acagcttatttggaagctgaaatgtgaggtttataacactcacaagaatcctgaaaaaggatgccaaacgtctttcagggaactgaagc

SEQ ID NO: 523 - RNA, 89 nt, synthetic construct
  source 1..89: mol_type = other RNA
acagcttatttggaagctgaaatgtgaggtttataacactcacaagaatcctgaaaaaggatgccaaacgggtattgaggtctcaggca

SEQ ID NO: 524 - RNA, 89 nt, synthetic construct
  source 1..89: mol_type = other RNA
acagcttatttggaagctgaaatgtgaggtttataacactcacaagaatcctgaaaaaggatgccaaacctccagtagtctttcaggga

SEQ ID NO: 525 - RNA, 89 nt, synthetic construct
  source 1..89: mol_type = other RNA
acagcttatttggaagctgaaatgtgaggtttataacactcacaagaatcctgaaaaaggatgccaaacgacttggggtattgaggtct

SEQ ID NO: 526 - RNA, 89 nt, synthetic construct
  source 1..89: mol_type = other RNA
acagcttatttggaagctgaaatgtgaggtttataacactcacaagaatcctgaaaaaggatgccaaacctgtcccttttaagcaacct

SEQ ID NO: 527 - RNA, 89 nt, synthetic construct
  source 1..89: mol_type = other RNA
acagcttatttggaagctgaaatgtgaggtttataacactcacaagaatcctgaaaaaggatgccaaacccctgaaagactactggagc

SEQ ID NO: 528 - RNA, 89 nt, synthetic construct
  source 1..89: mol_type = other RNA
acagcttatttggaagctgaaatgtgaggtttataacactcacaagaatcctgaaaaaggatgccaaactaggttgcttaaaagggaca

SEQ ID NO: 529 - RNA, 89 nt, synthetic construct
  source 1..89: mol_type = other RNA
acagcttatttggaagctgaaatgtgaggtttataacactcacaagaatcctgaaaaaggatgccaaaccctgaaagactactggagca

SEQ ID NO: 530 - RNA, 89 nt, synthetic construct
  source 1..89: mol_type = other RNA
acagcttatttggaagctgaaatgtgaggtttataacactcacaagaatcctgaaaaaggatgccaaacctggagcaccgttaaggaca

SEQ ID NO: 531 - RNA, 89 nt, synthetic construct
  source 1..89: mol_type = other RNA
acagcttatttggaagctgaaatgtgaggtttataacactcacaagaatcctgaaaaaggatgccaaacaaagactactggagcaccgt

SEQ ID NO: 532 - RNA, 89 nt, synthetic construct
  source 1..89: mol_type = other RNA
acagcttatttggaagctgaaatgtgaggtttataacactcacaagaatcctgaaaaaggatgccaaacgcttaaaagggacagtattc

SEQ ID NO: 533 - RNA, 89 nt, synthetic construct
  source 1..89: mol_type = other RNA
acagcttatttggaagctgaaatgtgaggtttataacactcacaagaatcctgaaaaaggatgccaaacagttccctgaaagactactg

SEQ ID NO: 534 - RNA, 89 nt, synthetic construct
  source 1..89: mol_type = other RNA
acagcttatttggaagctgaaatgtgaggtttataacactcacaagaatcctgaaaaaggatgccaaaccagttccctgaaagactact

SEQ ID NO: 535 - RNA, 89 nt, synthetic construct
  source 1..89: mol_type = other RNA
acagcttatttggaagctgaaatgtgaggtttataacactcacaagaatcctgaaaaaggatgccaaacaataccccaagtccacctgc

SEQ ID NO: 536 - RNA, 89 nt, synthetic construct
  source 1..89: mol_type = other RNA
acagcttatttggaagctgaaatgtgaggtttataacactcacaagaatcctgaaaaaggatgccaaacatgcctggcccccctccagg

SEQ ID NO: 537 - RNA, 89 nt, synthetic construct
  source 1..89: mol_type = other RNA
acagcttatttggaagctgaaatgtgaggtttataacactcacaagaatcctgaaaaaggatgccaaaccagggctgcccctgtaggtt

SEQ ID NO: 538 - RNA, 89 nt, synthetic construct
  source 1..89: mol_type = other RNA
acagcttatttggaagctgaaatgtgaggtttataacactcacaagaatcctgaaaaaggatgccaaacaaaagggacagtattctcag

SEQ ID NO: 539 - RNA, 89 nt, synthetic construct
  source 1..89: mol_type = other RNA
acagcttatttggaagctgaaatgtgaggtttataacactcacaagaatcctgaaaaaggatgccaaacccaataaagctggacaagaa

SEQ ID NO: 540 - RNA, 89 nt, synthetic construct
  source 1..89: mol_type = other RNA
acagcttatttggaagctgaaatgtgaggtttataacactcacaagaatcctgaaaaaggatgccaaacagggaactgaagccatcggt

SEQ ID NO: 541 - RNA, 89 nt, synthetic construct
  source 1..89: mol_type = other RNA
acagcttatttggaagctgaaatgtgaggtttataacactcacaagaatcctgaaaaaggatgccaaacttaagcaacctacaggggca

SEQ ID NO: 542 - RNA, 89 nt, synthetic construct
  source 1..89: mol_type = other RNA
acagcttatttggaagctgaaatgtgaggtttataacactcacaagaatcctgaaaaaggatgccaaaccttgtccagctttattggga

SEQ ID NO: 543 - RNA, 89 nt, synthetic construct
  source 1..89: mol_type = other RNA
acagcttatttggaagctgaaatgtgaggtttataacactcacaagaatcctgaaaaaggatgccaaacccttttaagcaacctacagg

SEQ ID NO: 544 - RNA, 89 nt, synthetic construct
  source 1..89: mol_type = other RNA
acagcttatttggaagctgaaatgtgaggtttataacactcacaagaatcctgaaaaaggatgccaaactttcagggaactgaagccat

SEQ ID NO: 545 - RNA, 89 nt, synthetic construct
  source 1..89: mol_type = other RNA
acagcttatttggaagctgaaatgtgaggtttataacactcacaagaatcctgaaaaaggatgccaaaccttaacggtgctccagtagt

SEQ ID NO: 546 - RNA, 89 nt, synthetic construct
  source 1..89: mol_type = other RNA
acagcttatttggaagctgaaatgtgaggtttataacactcacaagaatcctgaaaaaggatgccaaaccagtagtctttcagggaact

SEQ ID NO: 547 - RNA, 89 nt, synthetic construct
  source 1..89: mol_type = other RNA
acagcttatttggaagctgaaatgtgaggtttataacactcacaagaatcctgaaaaaggatgccaaactcagggaactgaagccatcg

SEQ ID NO: 548 - RNA, 89 nt, synthetic construct
  source 1..89: mol_type = other RNA
acagcttatttggaagctgaaatgtgaggtttataacactcacaagaatcctgaaaaaggatgccaaacaacggtgctccagtagtctt

SEQ ID NO: 549 - RNA, 89 nt, synthetic construct
  source 1..89: mol_type = other RNA
acagcttatttggaagctgaaatgtgaggtttataacactcacaagaatcctgaaaaaggatgccaaactaagcaacctacaggggcag

SEQ ID NO: 550 - RNA, 89 nt, synthetic construct
  source 1..89: mol_type = other RNA
acagcttatttggaagctgaaatgtgaggtttataacactcacaagaatcctgaaaaaggatgccaaacttgtccagctttattgggag

SEQ ID NO: 551 - RNA, 89 nt, synthetic construct
  source 1..89: mol_type = other RNA
acagcttatttggaagctgaaatgtgaggtttataacactcacaagaatcctgaaaaaggatgccaaacggggtattgaggtctcaggc

SEQ ID NO: 552 - RNA, 89 nt, synthetic construct
  source 1..89: mol_type = other RNA
acagcttatttggaagctgaaatgtgaggtttataacactcacaagaatcctgaaaaaggatgccaaaccagggaactgaagccatcgg

SEQ ID NO: 553 - RNA, 89 nt, synthetic construct
  source 1..89: mol_type = other RNA
acagcttatttggaagctgaaatgtgaggtttataacactcacaagaatcctgaaaaaggatgccaaacgtccttaacggtgctccagt

SEQ ID NO: 554 - RNA, 89 nt, synthetic construct
  source 1..89: mol_type = other RNA
acagcttatttggaagctgaaatgtgaggtttataacactcacaagaatcctgaaaaaggatgccaaacaagcaacctacaggggcagc

SEQ ID NO: 555 - RNA, 89 nt, synthetic construct
  source 1..89: mol_type = other RNA
acagcttatttggaagctgaaatgtgaggtttataacactcacaagaatcctgaaaaaggatgccaaacgagcagctgcctctagggat

SEQ ID NO: 556 - RNA, 89 nt, synthetic construct
  source 1..89: mol_type = other RNA
acagcttatttggaagctgaaatgtgaggtttataacactcacaagaatcctgaaaaaggatgccaaaccctggagcagctgcctctag

SEQ ID NO: 557 - RNA, 89 nt, synthetic construct
  source 1..89: mol_type = other RNA
acagcttatttggaagctgaaatgtgaggtttataacactcacaagaatcctgaaaaaggatgccaaacacctggagcagctgcctcta

SEQ ID NO: 558 - RNA, 89 nt, synthetic construct
  source 1..89: mol_type = other RNA
acagcttatttggaagctgaaatgtgaggtttataacactcacaagaatcctgaaaaaggatgccaaaccccagagggcattacctgga

SEQ ID NO: 559 - RNA, 89 nt, synthetic construct
  source 1..89: mol_type = other RNA
acagcttatttggaagctgaaatgtgaggtttataacactcacaagaatcctgaaaaaggatgccaaacccctccccagagggcattac

SEQ ID NO: 560 - RNA, 89 nt, synthetic construct
  source 1..89: mol_type = other RNA
acagcttatttggaagctgaaatgtgaggtttataacactcacaagaatcctgaaaaaggatgccaaaccccctccccagagggcatta

SEQ ID NO: 561 - RNA, 89 nt, synthetic construct
  source 1..89: mol_type = other RNA
acagcttatttggaagctgaaatgtgaggtttataacactcacaagaatcctgaaaaaggatgccaaactcccctccccagagggcatt

SEQ ID NO: 562 - RNA, 89 nt, synthetic construct
  source 1..89: mol_type = other RNA
acagcttatttggaagctgaaatgtgaggtttataacactcacaagaatcctgaaaaaggatgccaaactttcccctccccagagggca

SEQ ID NO: 563 - RNA, 89 nt, synthetic construct
  source 1..89: mol_type = other RNA
acagcttatttggaagctgaaatgtgaggtttataacactcacaagaatcctgaaaaaggatgccaaacctctttcccctccccagagg

SEQ ID NO: 564 - RNA, 89 nt, synthetic construct
  source 1..89: mol_type = other RNA
acagcttatttggaagctgaaatgtgaggtttataacactcacaagaatcctgaaaaaggatgccaaacccctcctctttcccctcccc

SEQ ID NO: 565 - RNA, 89 nt, synthetic construct
  source 1..89: mol_type = other RNA
acagcttatttggaagctgaaatgtgaggtttataacactcacaagaatcctgaaaaaggatgccaaacctcccctcctctttcccctc

SEQ ID NO: 566 - RNA, 89 nt, synthetic construct
  source 1..89: mol_type = other RNA
acagcttatttggaagctgaaatgtgaggtttataacactcacaagaatcctgaaaaaggatgccaaacctctttcctcaggagcttca

SEQ ID NO: 567 - RNA, 89 nt, synthetic construct
  source 1..89: mol_type = other RNA
acagcttatttggaagctgaaatgtgaggtttataacactcacaagaatcctgaaaaaggatgccaaacaagctcctgaggaaagagca

SEQ ID NO: 568 - RNA, 89 nt, synthetic construct
  source 1..89: mol_type = other RNA
acagcttatttggaagctgaaatgtgaggtttataacactcacaagaatcctgaaaaaggatgccaaacagccctgctctttcctcagg

SEQ ID NO: 569 - RNA, 89 nt, synthetic construct
  source 1..89: mol_type = other RNA
acagcttatttggaagctgaaatgtgaggtttataacactcacaagaatcctgaaaaaggatgccaaactttcctcaggagcttcagag

SEQ ID NO: 570 - RNA, 89 nt, synthetic construct
  source 1..89: mol_type = other RNA
acagcttatttggaagctgaaatgtgaggtttataacactcacaagaatcctgaaaaaggatgccaaactcctcaggagcttcagaggc

SEQ ID NO: 571 - RNA, 89 nt, synthetic construct
  source 1..89: mol_type = other RNA
acagcttatttggaagctgaaatgtgaggtttataacactcacaagaatcctgaaaaaggatgccaaaccctcaggagcttcagaggcc

SEQ ID NO: 572 - RNA, 89 nt, synthetic construct
  source 1..89: mol_type = other RNA
acagcttatttggaagctgaaatgtgaggtttataacactcacaagaatcctgaaaaaggatgccaaacctcaggagcttcagaggccg

SEQ ID NO: 573 - RNA, 89 nt, synthetic construct
  source 1..89: mol_type = other RNA
acagcttatttggaagctgaaatgtgaggtttataacactcacaagaatcctgaaaaaggatgccaaacaggagcttcagaggccgagg

SEQ ID NO: 574 - RNA, 89 nt, synthetic construct
  source 1..89: mol_type = other RNA
acagcttatttggaagctgaaatgtgaggtttataacactcacaagaatcctgaaaaaggatgccaaactgaagctcctgaggaaagag

SEQ ID NO: 575 - RNA, 89 nt, synthetic construct
  source 1..89: mol_type = other RNA
acagcttatttggaagctgaaatgtgaggtttataacactcacaagaatcctgaaaaaggatgccaaacggcctctgaagctcctgagg

SEQ ID NO: 576 - RNA, 89 nt, synthetic construct
  source 1..89: mol_type = other RNA
acagcttatttggaagctgaaatgtgaggtttataacactcacaagaatcctgaaaaaggatgccaaacccctgctctgttgcttcccc

SEQ ID NO: 577 - RNA, 89 nt, synthetic construct
  source 1..89: mol_type = other RNA
acagcttatttggaagctgaaatgtgaggtttataacactcacaagaatcctgaaaaaggatgccaaacgcctgctgggccacctggga

SEQ ID NO: 578 - RNA, 89 nt, synthetic construct
  source 1..89: mol_type = other RNA
acagcttatttggaagctgaaatgtgaggtttataacactcacaagaatcctgaaaaaggatgccaaaccctggcctgctgggccacct

SEQ ID NO: 579 - RNA, 89 nt, synthetic construct
  source 1..89: mol_type = other RNA
acagcttatttggaagctgaaatgtgaggtttataacactcacaagaatcctgaaaaaggatgccaaactacctggcctgctgggccac

SEQ ID NO: 580 - RNA, 89 nt, synthetic construct
  source 1..89: mol_type = other RNA
acagcttatttggaagctgaaatgtgaggtttataacactcacaagaatcctgaaaaaggatgccaaacgggagggaggccagcgggtg

SEQ ID NO: 581 - RNA, 89 nt, synthetic construct
  source 1..89: mol_type = other RNA
acagcttatttggaagctgaaatgtgaggtttataacactcacaagaatcctgaaaaaggatgccaaaccccccagcccagtcccacca

SEQ ID NO: 582 - RNA, 89 nt, synthetic construct; identical to SEQ ID NO: 576
  source 1..89: mol_type = other RNA

SEQ ID NO: 583 - RNA, 89 nt, synthetic construct
  source 1..89: mol_type = other RNA
acagcttatttggaagctgaaatgtgaggtttataacactcacaagaatcctgaaaaaggatgccaaacgcctcagggttcaaatccca

SEQ ID NO: 584 - RNA, 89 nt, synthetic construct
  source 1..89: mol_type = other RNA
acagcttatttggaagctgaaatgtgaggtttataacactcacaagaatcctgaaaaaggatgccaaacgccctgcatgaagccaagaa

SEQ ID NO: 585 - RNA, 89 nt, synthetic construct
  source 1..89: mol_type = other RNA
acagcttatttggaagctgaaatgtgaggtttataacactcacaagaatcctgaaaaaggatgccaaacgaagcgggtcccgtcctcct

SEQ ID NO: 586 - RNA, 89 nt, synthetic construct
  source 1..89: mol_type = other RNA
acagcttatttggaagctgaaatgtgaggtttataacactcacaagaatcctgaaaaaggatgccaaactctaggagatacacctccac

SEQ ID NO: 587 - RNA, 89 nt, synthetic construct
  source 1..89: mol_type = other RNA
acagcttatttggaagctgaaatgtgaggtttataacactcacaagaatcctgaaaaaggatgccaaacaccatgaccctgccctcgat

SEQ ID NO: 588 - RNA, 89 nt, synthetic construct
  source 1..89: mol_type = other RNA
acagcttatttggaagctgaaatgtgaggtttataacactcacaagaatcctgaaaaaggatgccaaacaccctgccctcgatttcccg

SEQ ID NO: 589 - RNA, 89 nt, synthetic construct
  source 1..89: mol_type = other RNA
acagcttatttggaagctgaaatgtgaggtttataacactcacaagaatcctgaaaaaggatgccaaacccctcgatttcccggtggtc

SEQ ID NO: 590 - RNA, 89 nt, synthetic construct
  source 1..89: mol_type = other RNA
acagcttatttggaagctgaaatgtgaggtttataacactcacaagaatcctgaaaaaggatgccaaactatgctggtgtctaggagat

SEQ ID NO: 591 - RNA, 89 nt, synthetic construct
  source 1..89: mol_type = other RNA
acagcttatttggaagctgaaatgtgaggtttataacactcacaagaatcctgaaaaaggatgccaaactgctggtgtctaggagatac

SEQ ID NO: 592 - RNA, 89 nt, synthetic construct
  source 1..89: mol_type = other RNA
acagcttatttggaagctgaaatgtgaggtttataacactcacaagaatcctgaaaaaggatgccaaacgtcactctgtatgctggtgt

SEQ ID NO: 593 - RNA, 89 nt, synthetic construct
  source 1..89: mol_type = other RNA
acagcttatttggaagctgaaatgtgaggtttataacactcacaagaatcctgaaaaaggatgccaaactggaagcgggtcccgtcctc

SEQ ID NO: 594 - RNA, 89 nt, synthetic construct
  source 1..89: mol_type = other RNA
acagcttatttggaagctgaaatgtgaggtttataacactcacaagaatcctgaaaaaggatgccaaacctggtgtctaggagatacac

SEQ ID NO: 595 - RNA, 89 nt, synthetic construct
  source 1..89: mol_type = other RNA
acagcttatttggaagctgaaatgtgaggtttataacactcacaagaatcctgaaaaaggatgccaaacggagatacacctccaccagg

SEQ ID NO: 596 - RNA, 89 nt, synthetic construct
  source 1..89: mol_type = other RNA
acagcttatttggaagctgaaatgtgaggtttataacactcacaagaatcctgaaaaaggatgccaaacgtgtctaggagatacacctc

SEQ ID NO: 597 - RNA, 89 nt, synthetic construct
  source 1..89: mol_type = other RNA
acagcttatttggaagctgaaatgtgaggtttataacactcacaagaatcctgaaaaaggatgccaaaccacctccaccaggctgcctc

SEQ ID NO: 598 - RNA, 89 nt, synthetic construct
  source 1..89: mol_type = other RNA
acagcttatttggaagctgaaatgtgaggtttataacactcacaagaatcctgaaaaaggatgccaaacgacaccagcatacagagtga

SEQ ID NO: 599 - RNA, 89 nt, synthetic construct
  source 1..89: mol_type = other RNA
acagcttatttggaagctgaaatgtgaggtttataacactcacaagaatcctgaaaaaggatgccaaactgcccgaggaggacgggacc

SEQ ID NO: 600 - RNA, 89 nt, synthetic construct
  source 1..89: mol_type = other RNA
acagcttatttggaagctgaaatgtgaggtttataacactcacaagaatcctgaaaaaggatgccaaacgtggaggtgtatctcctaga

SEQ ID NO: 601 - RNA, 89 nt, synthetic construct
  source 1..89: mol_type = other RNA
acagcttatttggaagctgaaatgtgaggtttataacactcacaagaatcctgaaaaaggatgccaaactctcctagacaccagcatac

SEQ ID NO: 602 - RNA, 89 nt, synthetic construct
  source 1..89: mol_type = other RNA
acagcttatttggaagctgaaatgtgaggtttataacactcacaagaatcctgaaaaaggatgccaaaccagagtgaccaccgggaaat

SEQ ID NO: 603 - RNA, 89 nt, synthetic construct
  source 1..89: mol_type = other RNA
acagcttatttggaagctgaaatgtgaggtttataacactcacaagaatcctgaaaaaggatgccaaactatctcctagacaccagcat

SEQ ID NO: 604 - RNA, 89 nt, synthetic construct
  source 1..89: mol_type = other RNA
acagcttatttggaagctgaaatgtgaggtttataacactcacaagaatcctgaaaaaggatgccaaacaccaccgggaaatcgagggc

SEQ ID NO: 605 - RNA, 89 nt, synthetic construct
  source 1..89: mol_type = other RNA
acagcttatttggaagctgaaatgtgaggtttataacactcacaagaatcctgaaaaaggatgccaaacgaggtgtatctcctagacac

SEQ ID NO: 606 - RNA, 89 nt, synthetic construct
  source 1..89: mol_type = other RNA
acagcttatttggaagctgaaatgtgaggtttataacactcacaagaatcctgaaaaaggatgccaaaccccgaggaggacgggacccg

SEQ ID NO: 607 - RNA, 89 nt, synthetic construct
  source 1..89: mol_type = other RNA
acagcttatttggaagctgaaatgtgaggtttataacactcacaagaatcctgaaaaaggatgccaaaccccttcccttggcagttgag

SEQ ID NO: 608 - RNA, 89 nt, synthetic construct
  source 1..89: mol_type = other RNA
acagcttatttggaagctgaaatgtgaggtttataacactcacaagaatcctgaaaaaggatgccaaacgcagttgagcacgcgcaggc

SEQ ID NO: 609 - RNA, 89 nt, synthetic construct
  source 1..89: mol_type = other RNA
acagcttatttggaagctgaaatgtgaggtttataacactcacaagaatcctgaaaaaggatgccaaacaccgtgcccttcccttggca

SEQ ID NO: 610 - RNA, 89 nt, synthetic construct
  source 1..89: mol_type = other RNA
acagcttatttggaagctgaaatgtgaggtttataacactcacaagaatcctgaaaaaggatgccaaacgccacgccggcatcccggcc

SEQ ID NO: 611 - RNA, 89 nt, synthetic construct
  source 1..89: mol_type = other RNA
acagcttatttggaagctgaaatgtgaggtttataacactcacaagaatcctgaaaaaggatgccaaacaccacccctgccaggtgggt

SEQ ID NO: 612 - RNA, 89 nt, synthetic construct
  source 1..89: mol_type = other RNA
acagcttatttggaagctgaaatgtgaggtttataacactcacaagaatcctgaaaaaggatgccaaacgcaggggtggtcagcggccg

SEQ ID NO: 613 - RNA, 89 nt, synthetic construct
  source 1..89: mol_type = other RNA
acagcttatttggaagctgaaatgtgaggtttataacactcacaagaatcctgaaaaaggatgccaaacctcaactgccaagggaaggg

SEQ ID NO: 614 - RNA, 89 nt, synthetic construct
  source 1..89: mol_type = other RNA
acagcttatttggaagctgaaatgtgaggtttataacactcacaagaatcctgaaaaaggatgccaaacgtcagcggccgggatgccgg

SEQ ID NO: 615 - RNA, 89 nt, synthetic construct
  source 1..89: mol_type = other RNA
acagcttatttggaagctgaaatgtgaggtttataacactcacaagaatcctgaaaaaggatgccaaaccgcgtgctcaactgccaagg

SEQ ID NO: 616 - RNA, 89 nt, synthetic construct
  source 1..89: mol_type = other RNA
acagcttatttggaagctgaaatgtgaggtttataacactcacaagaatcctgaaaaaggatgccaaacgcacccacctggcaggggtg

SEQ ID NO: 617 - RNA, 89 nt, synthetic construct
  source 1..89: mol_type = other RNA
acagcttatttggaagctgaaatgtgaggtttataacactcacaagaatcctgaaaaaggatgccaaacccggcagcggtgaccagcac

SEQ ID NO: 618 - RNA, 89 nt, synthetic construct
  source 1..89: mol_type = other RNA
acagcttatttggaagctgaaatgtgaggtttataacactcacaagaatcctgaaaaaggatgccaaacgcttttccgaataaactcca

SEQ ID NO: 619 - RNA, 89 nt, synthetic construct
  source 1..89: mol_type = other RNA
acagcttatttggaagctgaaatgtgaggtttataacactcacaagaatcctgaaaaaggatgccaaactacccacccgccaggggcag

SEQ ID NO: 620 - RNA, 89 nt, synthetic construct
  source 1..89: mol_type = other RNA
acagcttatttggaagctgaaatgtgaggtttataacactcacaagaatcctgaaaaaggatgccaaacgaccagctggcttttccgaa

SEQ ID NO: 621 - RNA, 89 nt, synthetic construct
  source 1..89: mol_type = other RNA
acagcttatttggaagctgaaatgtgaggtttataacactcacaagaatcctgaaaaaggatgccaaaccccacccgccaggggcagca

SEQ ID NO: 622 - RNA, 89 nt, synthetic construct
  source 1..89: mol_type = other RNA
acagcttatttggaagctgaaatgtgaggtttataacactcacaagaatcctgaaaaaggatgccaaacgggagtagaggcaggcatcg

SEQ ID NO: 623 - RNA, 89 nt, synthetic construct
  source 1..89: mol_type = other RNA
acagcttatttggaagctgaaatgtgaggtttataacactcacaagaatcctgaaaaaggatgccaaacaccagcacgaccccagccct

SEQ ID NO: 624 - RNA, 89 nt, synthetic construct
  source 1..89: mol_type = other RNA
acagcttatttggaagctgaaatgtgaggtttataacactcacaagaatcctgaaaaaggatgccaaacgaggcaggcatcgtcccgga

SEQ ID NO: 625 - RNA, 89 nt, synthetic construct
  source 1..89: mol_type = other RNA
acagcttatttggaagctgaaatgtgaggtttataacactcacaagaatcctgaaaaaggatgccaaaccccctggcgggtgggtacag

SEQ ID NO: 626 - RNA, 89 nt, synthetic construct
  source 1..89: mol_type = other RNA
acagcttatttggaagctgaaatgtgaggtttataacactcacaagaatcctgaaaaaggatgccaaacgggtcgtgctggtcaccgct

SEQ ID NO: 627 - RNA, 89 nt, synthetic construct
  source 1..89: mol_type = other RNA
acagcttatttggaagctgaaatgtgaggtttataacactcacaagaatcctgaaaaaggatgccaaacctggtcaccgctgccggcaa

SEQ ID NO: 628 - RNA, 89 nt, synthetic construct
  source 1..89: mol_type = other RNA
acagcttatttggaagctgaaatgtgaggtttataacactcacaagaatcctgaaaaaggatgccaaacgtcaccgctgccggcaactt

SEQ ID NO: 629 - RNA, 89 nt, synthetic construct
  source 1..89: mol_type = other RNA
acagcttatttggaagctgaaatgtgaggtttataacactcacaagaatcctgaaaaaggatgccaaacctgcccctggcgggtgggta

SEQ ID NO: 630 - RNA, 89 nt, synthetic construct
  source 1..89: mol_type = other RNA
acagcttatttggaagctgaaatgtgaggtttataacactcacaagaatcctgaaaaaggatgccaaacgagtttattcggaaaagcca

SEQ ID NO: 631 - RNA, 89 nt, synthetic construct
  source 1..89: mol_type = other RNA
acagcttatttggaagctgaaatgtgaggtttataacactcacaagaatcctgaaaaaggatgccaaacgcgagggctggggtcgtgct

SEQ ID NO: 632 - RNA, 89 nt, synthetic construct
  source 1..89: mol_type = other RNA
acagcttatttggaagctgaaatgtgaggtttataacactcacaagaatcctgaaaaaggatgccaaacctgctgcccctggcgggtgg

SEQ ID NO: 633 - RNA, 89 nt, synthetic construct
  source 1..89: mol_type = other RNA
acagcttatttggaagctgaaatgtgaggtttataacactcacaagaatcctgaaaaaggatgccaaacttcggaaaagccagctggtc

SEQ ID NO: 634 - RNA, 89 nt, synthetic construct
  source 1..89: mol_type = other RNA
acagcttatttggaagctgaaatgtgaggtttataacactcacaagaatcctgaaaaaggatgccaaaccctgcctctactccccagcc

SEQ ID NO: 635 - RNA, 89 nt, synthetic construct
  source 1..89: mol_type = other RNA
acagcttatttggaagctgaaatgtgaggtttataacactcacaagaatcctgaaaaaggatgccaaacccagcgcctggcgagggctg

SEQ ID NO: 636 - RNA, 89 nt, synthetic construct
  source 1..89: mol_type = other RNA
acagcttatttggaagctgaaatgtgaggtttataacactcacaagaatcctgaaaaaggatgccaaacccggcaacttccgggacgat

SEQ ID NO: 637 - RNA, 89 nt, synthetic construct
  source 1..89: mol_type = other RNA
acagcttatttggaagctgaaatgtgaggtttataacactcacaagaatcctgaaaaaggatgccaaactcctcccctggggcaaagag

SEQ ID NO: 638 - RNA, 89 nt, synthetic construct
  source 1..89: mol_type = other RNA
acagcttatttggaagctgaaatgtgaggtttataacactcacaagaatcctgaaaaaggatgccaaacgaggcaccaatgatgtcctc

SEQ ID NO: 639 - RNA, 89 nt, synthetic construct
  source 1..89: mol_type = other RNA
acagcttatttggaagctgaaatgtgaggtttataacactcacaagaatcctgaaaaaggatgccaaacggcattggtggccccaactg

SEQ ID NO: 640 - RNA, 89 nt, synthetic construct
  source 1..89: mol_type = other RNA
acagcttatttggaagctgaaatgtgaggtttataacactcacaagaatcctgaaaaaggatgccaaacatgtcctcccctggggcaaa

SEQ ID NO: 641 - RNA, 89 nt, synthetic construct
  source 1..89: mol_type = other RNA
acagcttatttggaagctgaaatgtgaggtttataacactcacaagaatcctgaaaaaggatgccaaacacacaaagcaggtgctgcag

SEQ ID NO: 642 - RNA, 89 nt, synthetic construct
  source 1..89: mol_type = other RNA
acagcttatttggaagctgaaatgtgaggtttataacactcacaagaatcctgaaaaaggatgccaaacgtggccccaactgtgatgac

SEQ ID NO: 643 - RNA, 89 nt, synthetic construct
  source 1..89: mol_type = other RNA
acagcttatttggaagctgaaatgtgaggtttataacactcacaagaatcctgaaaaaggatgccaaacctgcagtcgctggaggcacc

SEQ ID NO: 644 - RNA, 89 nt, synthetic construct
  source 1..89: mol_type = other RNA
acagcttatttggaagctgaaatgtgaggtttataacactcacaagaatcctgaaaaaggatgccaaaccagtcgctggaggcaccaat

SEQ ID NO: 645 - RNA, 89 nt, synthetic construct
  source 1..89: mol_type = other RNA
acagcttatttggaagctgaaatgtgaggtttataacactcacaagaatcctgaaaaaggatgccaaacgtccccaaagtccccagggt

SEQ ID NO: 646 - RNA, 89 nt, synthetic construct
  source 1..89: mol_type = other RNA
acagcttatttggaagctgaaatgtgaggtttataacactcacaagaatcctgaaaaaggatgccaaacgggcaaagaggtccacacag

SEQ ID NO: 647 - RNA, 89 nt, synthetic construct
  source 1..89: mol_type = other RNA
acagcttatttggaagctgaaatgtgaggtttataacactcacaagaatcctgaaaaaggatgccaaacgtgcctccagcgactgcagc

SEQ ID NO: 648 - RNA, 89 nt, synthetic construct
  source 1..89: mol_type = other RNA
acagcttatttggaagctgaaatgtgaggtttataacactcacaagaatcctgaaaaaggatgccaaaccctccagcgactgcagcacc

SEQ ID NO: 649 - RNA, 89 nt, synthetic construct
  source 1..89: mol_type = other RNA
acagcttatttggaagctgaaatgtgaggtttataacactcacaagaatcctgaaaaaggatgccaaacgccgctgtgtggacctcttt

SEQ ID NO: 650 - RNA, 89 nt, synthetic construct
  source 1..89: mol_type = other RNA
acagcttatttggaagctgaaatgtgaggtttataacactcacaagaatcctgaaaaaggatgccaaacgacctctttgccccagggga

SEQ ID NO: 651 - RNA, 89 nt, synthetic construct
  source 1..89: mol_type = other RNA
acagcttatttggaagctgaaatgtgaggtttataacactcacaagaatcctgaaaaaggatgccaaacaccctggggactttggggac

SEQ ID NO: 652 - RNA, 89 nt, synthetic construct
  source 1..89: mol_type = other RNA
acagcttatttggaagctgaaatgtgaggtttataacactcacaagaatcctgaaaaaggatgccaaactggacctctttgccccaggg

SEQ ID NO: 653 - RNA, 89 nt, synthetic construct
  source 1..89: mol_type = other RNA
acagcttatttggaagctgaaatgtgaggtttataacactcacaagaatcctgaaaaaggatgccaaaccagcacctgctttgtgtcac

SEQ ID NO: 654 - RNA, 89 nt, synthetic construct
  source 1..89: mol_type = other RNA
acagcttatttggaagctgaaatgtgaggtttataacactcacaagaatcctgaaaaaggatgccaaacgggaccaactttggccgctg

SEQ ID NO: 655 - RNA, 89 nt, synthetic construct
  source 1..89: mol_type = other RNA
acagcttatttggaagctgaaatgtgaggtttataacactcacaagaatcctgaaaaaggatgccaaacgggactttggggaccaactt

SEQ ID NO: 656 - RNA, 89 nt, synthetic construct
  source 1..89: mol_type = other RNA
acagcttatttggaagctgaaatgtgaggtttataacactcacaagaatcctgaaaaaggatgccaaactgtggacctctttgccccag

SEQ ID NO: 657 - RNA, 89 nt, synthetic construct
  source 1..89: mol_type = other RNA
acagcttatttggaagctgaaatgtgaggtttataacactcacaagaatcctgaaaaaggatgccaaacccccaggggaggacatcatt

SEQ ID NO: 658 - RNA, 89 nt, synthetic construct
  source 1..89: mol_type = other RNA
acagcttatttggaagctgaaatgtgaggtttataacactcacaagaatcctgaaaaaggatgccaaacgatcagtctctgcctcaact

SEQ ID NO: 659 - RNA, 89 nt, synthetic construct
  source 1..89: mol_type = other RNA
acagcttatttggaagctgaaatgtgaggtttataacactcacaagaatcctgaaaaaggatgccaaacgcagagaagtggatcagtct

SEQ ID NO: 660 - RNA, 89 nt, synthetic construct
  source 1..89: mol_type = other RNA
acagcttatttggaagctgaaatgtgaggtttataacactcacaagaatcctgaaaaaggatgccaaacagctccggctcggcagacag

SEQ ID NO: 661 - RNA, 89 nt, synthetic construct
  source 1..89: mol_type = other RNA
acagcttatttggaagctgaaatgtgaggtttataacactcacaagaatcctgaaaaaggatgccaaacgtcctcagggaaccaggcct

SEQ ID NO: 662 - RNA, 89 nt, synthetic construct
  source 1..89: mol_type = other RNA
acagcttatttggaagctgaaatgtgaggtttataacactcacaagaatcctgaaaaaggatgccaaacatgacatctttggcagagaa

SEQ ID NO: 663 - RNA, 89 nt, synthetic construct
  source 1..89: mol_type = other RNA
acagcttatttggaagctgaaatgtgaggtttataacactcacaagaatcctgaaaaaggatgccaaacacatctttggcagagaagtg

SEQ ID NO: 664 - RNA, 89 nt, synthetic construct
  source 1..89: mol_type = other RNA
acagcttatttggaagctgaaatgtgaggtttataacactcacaagaatcctgaaaaaggatgccaaacctgtctgccgagccggagct

SEQ ID NO: 665 - RNA, 89 nt, synthetic construct
  source 1..89: mol_type = other RNA
acagcttatttggaagctgaaatgtgaggtttataacactcacaagaatcctgaaaaaggatgccaaaccagccatgatgctgtctgcc

SEQ ID NO: 666 - RNA, 89 nt, synthetic construct
  source 1..89: mol_type = other RNA
acagcttatttggaagctgaaatgtgaggtttataacactcacaagaatcctgaaaaaggatgccaaacatccacttctctgccaaaga

SEQ ID NO: 667 - RNA, 89 nt, synthetic construct
  source 1..89: mol_type = other RNA
acagcttatttggaagctgaaatgtgaggtttataacactcacaagaatcctgaaaaaggatgccaaacaggcctggttccctgaggac

SEQ ID NO: 668 - RNA, 89 nt, synthetic construct
  source 1..89: mol_type = other RNA
acagcttatttggaagctgaaatgtgaggtttataacactcacaagaatcctgaaaaaggatgccaaacatgctgtctgccgagccgga

SEQ ID NO: 669 - RNA, 89 nt, synthetic construct
  source 1..89: mol_type = other RNA
acagcttatttggaagctgaaatgtgaggtttataacactcacaagaatcctgaaaaaggatgccaaacaggcagagactgatccactt

SEQ ID NO: 670 - RNA, 89 nt, synthetic construct
  source 1..89: mol_type = other RNA
acagcttatttggaagctgaaatgtgaggtttataacactcacaagaatcctgaaaaaggatgccaaacccaaagatgtcatcaatgag

SEQ ID NO: 671 - RNA, 89 nt, synthetic construct
  source 1..89: mol_type = other RNA
acagcttatttggaagctgaaatgtgaggtttataacactcacaagaatcctgaaaaaggatgccaaactctgccgagccggagctcac

SEQ ID NO: 672 - RNA, 89 nt, synthetic construct
  source 1..89: mol_type = other RNA
acagcttatttggaagctgaaatgtgaggtttataacactcacaagaatcctgaaaaaggatgccaaacgccgagttgaggcagagact

SEQ ID NO: 673 - RNA, 89 nt, synthetic construct
  source 1..89: mol_type = other RNA
acagcttatttggaagctgaaatgtgaggtttataacactcacaagaatcctgaaaaaggatgccaaactcatcaatgaggcctggttc

SEQ ID NO: 674 - RNA, 89 nt, synthetic construct
  source 1..89: mol_type = other RNA
acagcttatttggaagctgaaatgtgaggtttataacactcacaagaatcctgaaaaaggatgccaaactggccatccgtgtaggcccc

SEQ ID NO: 675 - RNA, 89 nt, synthetic construct
  source 1..89: mol_type = other RNA
acagcttatttggaagctgaaatgtgaggtttataacactcacaagaatcctgaaaaaggatgccaaacgagcagctcagcagctcctc

SEQ ID NO: 676 - RNA, 89 nt, synthetic construct
  source 1..89: mol_type = other RNA
acagcttatttggaagctgaaatgtgaggtttataacactcacaagaatcctgaaaaaggatgccaaaccgctcgccccgccgcttccc

SEQ ID NO: 677 - RNA, 89 nt, synthetic construct
  source 1..89: mol_type = other RNA
acagcttatttggaagctgaaatgtgaggtttataacactcacaagaatcctgaaaaaggatgccaaacgagaaactggagcagctcag

SEQ ID NO: 678 - RNA, 89 nt, synthetic construct
  source 1..89: mol_type = other RNA
acagcttatttggaagctgaaatgtgaggtttataacactcacaagaatcctgaaaaaggatgccaaacgccatccgtgtaggccccga

SEQ ID NO: 679 - RNA, 89 nt, synthetic construct
  source 1..89: mol_type = other RNA
acagcttatttggaagctgaaatgtgaggtttataacactcacaagaatcctgaaaaaggatgccaaactaggccccgagtgtgctgac

SEQ ID NO: 680 - RNA, 89 nt, synthetic construct
  source 1..89: mol_type = other RNA
acagcttatttggaagctgaaatgtgaggtttataacactcacaagaatcctgaaaaaggatgccaaacggccccgagtgtgctgacca

SEQ ID NO: 681 - RNA, 89 nt, synthetic construct
  source 1..89: mol_type = other RNA
acagcttatttggaagctgaaatgtgaggtttataacactcacaagaatcctgaaaaaggatgccaaacggaagcggcggggcgagcgc

SEQ ID NO: 682 - RNA, 89 nt, synthetic construct
  source 1..89: mol_type = other RNA
acagcttatttggaagctgaaatgtgaggtttataacactcacaagaatcctgaaaaaggatgccaaacctgagctgctccagtttctc

SEQ ID NO: 683 - RNA, 89 nt, synthetic construct
  source 1..89: mol_type = other RNA
acagcttatttggaagctgaaatgtgaggtttataacactcacaagaatcctgaaaaaggatgccaaactggtcagcacactcggggcc

SEQ ID NO: 684 - RNA, 89 nt, synthetic construct
  source 1..89: mol_type = other RNA
acagcttatttggaagctgaaatgtgaggtttataacactcacaagaatcctgaaaaaggatgccaaacctccagtttctccaggagtg

SEQ ID NO: 685 - RNA, 89 nt, synthetic construct
  source 1..89: mol_type = other RNA
acagcttatttggaagctgaaatgtgaggtttataacactcacaagaatcctgaaaaaggatgccaaacgcagctgttttgcaggactg

SEQ ID NO: 686 - RNA, 89 nt, synthetic construct
  source 1..89: mol_type = other RNA
acagcttatttggaagctgaaatgtgaggtttataacactcacaagaatcctgaaaaaggatgccaaacaggagctgctgagctgctcc

SEQ ID NO: 687 - RNA, 89 nt, synthetic construct
  source 1..89: mol_type = other RNA
acagcttatttggaagctgaaatgtgaggtttataacactcacaagaatcctgaaaaaggatgccaaacagctgctccagtttctccag

SEQ ID NO: 688 - RNA, 89 nt, synthetic construct
  source 1..89: mol_type = other RNA
acagcttatttggaagctgaaatgtgaggtttataacactcacaagaatcctgaaaaaggatgccaaacgtcagcacactcggggccta

SEQ ID NO: 689 - RNA, 89 nt, synthetic construct
  source 1..89: mol_type = other RNA
acagcttatttggaagctgaaatgtgaggtttataacactcacaagaatcctgaaaaaggatgccaaacgagctgtgtggacgctgcag

SEQ ID NO: 690 - RNA, 89 nt, synthetic construct
  source 1..89: mol_type = other RNA
acagcttatttggaagctgaaatgtgaggtttataacactcacaagaatcctgaaaaaggatgccaaacgcagtggacacgggtcccca

SEQ ID NO: 691 - RNA, 89 nt, synthetic construct
  source 1..89: mol_type = other RNA
acagcttatttggaagctgaaatgtgaggtttataacactcacaagaatcctgaaaaaggatgccaaacgcgtagacaccctcaccccc

SEQ ID NO: 692 - RNA, 89 nt, synthetic construct
  source 1..89: mol_type = other RNA
acagcttatttggaagctgaaatgtgaggtttataacactcacaagaatcctgaaaaaggatgccaaacgacaccctcacccccaaaag

SEQ ID NO: 693 - RNA, 89 nt, synthetic construct
  source 1..89: mol_type = other RNA
acagcttatttggaagctgaaatgtgaggtttataacactcacaagaatcctgaaaaaggatgccaaacgacacgggtccccatgctgg

SEQ ID NO: 694 - RNA, 89 nt, synthetic construct
  source 1..89: mol_type = other RNA
acagcttatttggaagctgaaatgtgaggtttataacactcacaagaatcctgaaaaaggatgccaaacgggtagcaggcagcacctgg

SEQ ID NO: 695 - RNA, 89 nt, synthetic construct
  source 1..89: mol_type = other RNA
acagcttatttggaagctgaaatgtgaggtttataacactcacaagaatcctgaaaaaggatgccaaacgcaggcagcacctggcaatg

SEQ ID NO: 696 - RNA, 89 nt, synthetic construct
  source 1..89: mol_type = other RNA
acagcttatttggaagctgaaatgtgaggtttataacactcacaagaatcctgaaaaaggatgccaaacgtggagctgtgtggacgctg

SEQ ID NO: 697 - RNA, 89 nt, synthetic construct
  source 1..89: mol_type = other RNA
acagcttatttggaagctgaaatgtgaggtttataacactcacaagaatcctgaaaaaggatgccaaacgcaatggcgtagacaccctc

SEQ ID NO: 698 - RNA, 89 nt, synthetic construct
  source 1..89: mol_type = other RNA
acagcttatttggaagctgaaatgtgaggtttataacactcacaagaatcctgaaaaaggatgccaaacccaggtgctgcctgctaccc

SEQ ID NO: 699 - RNA, 89 nt, synthetic construct
  source 1..89: mol_type = other RNA
acagcttatttggaagctgaaatgtgaggtttataacactcacaagaatcctgaaaaaggatgccaaacggggtgagggtgtctacgcc

SEQ ID NO: 700 - RNA, 89 nt, synthetic construct
  source 1..89: mol_type = other RNA
acagcttatttggaagctgaaatgtgaggtttataacactcacaagaatcctgaaaaaggatgccaaaccgccattgccaggtgctgcc

SEQ ID NO: 701 - RNA, 89 nt, synthetic construct
  source 1..89: mol_type = other RNA
acagcttatttggaagctgaaatgtgaggtttataacactcacaagaatcctgaaaaaggatgccaaacagggtgtctacgccattgcc

SEQ ID NO: 702 - RNA, 89 nt, synthetic construct
  source 1..89: mol_type = other RNA
acagcttatttggaagctgaaatgtgaggtttataacactcacaagaatcctgaaaaaggatgccaaactctacgccattgccaggtgc

SEQ ID NO: 703 - RNA, 89 nt, synthetic construct
  source 1..89: mol_type = other RNA
acagcttatttggaagctgaaatgtgaggtttataacactcacaagaatcctgaaaaaggatgccaaacccgggcccacaacgcttttg

SEQ ID NO: 704 - RNA, 89 nt, synthetic construct
  source 1..89: mol_type = other RNA
acagcttatttggaagctgaaatgtgaggtttataacactcacaagaatcctgaaaaaggatgccaaaccagcgtccacacagctccac

SEQ ID NO: 705 - RNA, 89 nt, synthetic construct
  source 1..89: mol_type = other RNA
acagcttatttggaagctgaaatgtgaggtttataacactcacaagaatcctgaaaaaggatgccaaacgggacccgtgtccactgcca

SEQ ID NO: 706 - RNA, 89 nt, synthetic construct
  source 1..89: mol_type = other RNA
acagcttatttggaagctgaaatgtgaggtttataacactcacaagaatcctgaaaaaggatgccaaactgggtgccaaggtcctccac

SEQ ID NO: 707 - RNA, 89 nt, synthetic construct
  source 1..89: mol_type = other RNA
acagcttatttggaagctgaaatgtgaggtttataacactcacaagaatcctgaaaaaggatgccaaacccaaggtcctccacctccca

SEQ ID NO: 708 - RNA, 89 nt, synthetic construct
  source 1..89: mol_type = other RNA
acagcttatttggaagctgaaatgtgaggtttataacactcacaagaatcctgaaaaaggatgccaaacactttgcattccagacctgg

SEQ ID NO: 709 - RNA, 89 nt, synthetic construct
  source 1..89: mol_type = other RNA
acagcttatttggaagctgaaatgtgaggtttataacactcacaagaatcctgaaaaaggatgccaaacgcagcaggaagcgtggatgc

SEQ ID NO: 710 - RNA, 89 nt, synthetic construct
  source 1..89: mol_type = other RNA
acagcttatttggaagctgaaatgtgaggtttataacactcacaagaatcctgaaaaaggatgccaaacggctgacctcgtggcctcag

SEQ ID NO: 711 - RNA, 89 nt, synthetic construct
  source 1..89: mol_type = other RNA
acagcttatttggaagctgaaatgtgaggtttataacactcacaagaatcctgaaaaaggatgccaaacgcctcagcacaggcggcttg

SEQ ID NO: 712 - RNA, 89 nt, synthetic construct
  source 1..89: mol_type = other RNA
acagcttatttggaagctgaaatgtgaggtttataacactcacaagaatcctgaaaaaggatgccaaacacctcgtggcctcagcacag

SEQ ID NO: 713 - RNA, 89 nt, synthetic construct
  source 1..89: mol_type = other RNA
acagcttatttggaagctgaaatgtgaggtttataacactcacaagaatcctgaaaaaggatgccaaacctccttgactttgcattcca

SEQ ID NO: 714 - RNA, 89 nt, synthetic construct
  source 1..89: mol_type = other RNA
acagcttatttggaagctgaaatgtgaggtttataacactcacaagaatcctgaaaaaggatgccaaaccattccagacctggggcatg

SEQ ID NO: 715 - RNA, 89 nt, synthetic construct
  source 1..89: mol_type = other RNA
acagcttatttggaagctgaaatgtgaggtttataacactcacaagaatcctgaaaaaggatgccaaacggtgccaaggtcctccacct

SEQ ID NO: 716 - RNA, 89 nt, synthetic construct
  source 1..89: mol_type = other RNA
acagcttatttggaagctgaaatgtgaggtttataacactcacaagaatcctgaaaaaggatgccaaacgttgggctgacctcgtggcc

SEQ ID NO: 717 - RNA, 89 nt, synthetic construct
  source 1..89: mol_type = other RNA
acagcttatttggaagctgaaatgtgaggtttataacactcacaagaatcctgaaaaaggatgccaaacgggcatggcagcaggaagcg

SEQ ID NO: 718 - RNA, 89 nt, synthetic construct
  source 1..89: mol_type = other RNA
acagcttatttggaagctgaaatgtgaggtttataacactcacaagaatcctgaaaaaggatgccaaacaggggccgggattccatgct

SEQ ID NO: 719 - RNA, 89 nt, synthetic construct
  source 1..89: mol_type = other RNA
acagcttatttggaagctgaaatgtgaggtttataacactcacaagaatcctgaaaaaggatgccaaactgctgaggccacgaggtcag

SEQ ID NO: 720 - RNA, 89 nt, synthetic construct
  source 1..89: mol_type = other RNA
acagcttatttggaagctgaaatgtgaggtttataacactcacaagaatcctgaaaaaggatgccaaacgcacccacaagccgcctgtg

SEQ ID NO: 721 - RNA, 89 nt, synthetic construct
  source 1..89: mol_type = other RNA
acagcttatttggaagctgaaatgtgaggtttataacactcacaagaatcctgaaaaaggatgccaaacccccaggtctggaatgcaaa

SEQ ID NO: 722 - RNA, 89 nt, synthetic construct
  source 1..89: mol_type = other RNA
acagcttatttggaagctgaaatgtgaggtttataacactcacaagaatcctgaaaaaggatgccaaacgaggaccttggcacccacaa

SEQ ID NO: 723 - RNA, 89 nt, synthetic construct
  source 1..89: mol_type = other RNA
acagcttatttggaagctgaaatgtgaggtttataacactcacaagaatcctgaaaaaggatgccaaacctgaggccacgaggtcagcc

SEQ ID NO: 724 - RNA, 89 nt, synthetic construct
  source 1..89: mol_type = other RNA
acagcttatttggaagctgaaatgtgaggtttataacactcacaagaatcctgaaaaaggatgccaaacgaatgcaaagtcaaggagca

SEQ ID NO: 725 - RNA, 89 nt, synthetic construct
  source 1..89: mol_type = other RNA
acagcttatttggaagctgaaatgtgaggtttataacactcacaagaatcctgaaaaaggatgccaaacccatgccccaggtctggaat

SEQ ID NO: 726 - RNA, 89 nt, synthetic construct
  source 1..89: mol_type = other RNA
acagcttatttggaagctgaaatgtgaggtttataacactcacaagaatcctgaaaaaggatgccaaacctgccatgccccaggtctgg

SEQ ID NO: 727 - RNA, 89 nt, synthetic construct
  source 1..89: mol_type = other RNA
acagcttatttggaagctgaaatgtgaggtttataacactcacaagaatcctgaaaaaggatgccaaacggaggtggaggaccttggca

SEQ ID NO: 728 - RNA, 89 nt, synthetic construct
  source 1..89: mol_type = other RNA
acagcttatttggaagctgaaatgtgaggtttataacactcacaagaatcctgaaaaaggatgccaaacaggccacgaggtcagcccaa

SEQ ID NO: 729 - RNA, 89 nt, synthetic construct
  source 1..89: mol_type = other RNA
acagcttatttggaagctgaaatgtgaggtttataacactcacaagaatcctgaaaaaggatgccaaaccaaagtcaaggagcatggaa

SEQ ID NO: 730 - RNA, 89 nt, synthetic construct
  source 1..89: mol_type = other RNA
acagcttatttggaagctgaaatgtgaggtttataacactcacaagaatcctgaaaaaggatgccaaaccagctcccactgggaggtgg

SEQ ID NO: 731 - RNA, 89 nt, synthetic construct
  source 1..89: mol_type = other RNA
acagcttatttggaagctgaaatgtgaggtttataacactcacaagaatcctgaaaaaggatgccaaacgaatcccggcccctcaggag

SEQ ID NO: 732 - RNA, 89 nt, synthetic construct
  source 1..89: mol_type = other RNA
acagcttatttggaagctgaaatgtgaggtttataacactcacaagaatcctgaaaaaggatgccaaacgctgtaaaaaggcaacagag

SEQ ID NO: 733 - RNA, 89 nt, synthetic construct
  source 1..89: mol_type = other RNA
acagcttatttggaagctgaaatgtgaggtttataacactcacaagaatcctgaaaaaggatgccaaaccaaaagcaaaacaggtctag

SEQ ID NO: 734 - RNA, 89 nt, synthetic construct
  source 1..89: mol_type = other RNA
acagcttatttggaagctgaaatgtgaggtttataacactcacaagaatcctgaaaaaggatgccaaacaatgtctgcttgcttgggtg

SEQ ID NO: 735 - RNA, 89 nt, synthetic construct
  source 1..89: mol_type = other RNA
acagcttatttggaagctgaaatgtgaggtttataacactcacaagaatcctgaaaaaggatgccaaacaaaatgctacaaaacccaga

SEQ ID NO: 736 - RNA, 89 nt, synthetic construct
  source 1..89: mol_type = other RNA
acagcttatttggaagctgaaatgtgaggtttataacactcacaagaatcctgaaaaaggatgccaaaccttgcttgggtggggctggt

SEQ ID NO: 737 - RNA, 89 nt, synthetic construct
  source 1..89: mol_type = other RNA
acagcttatttggaagctgaaatgtgaggtttataacactcacaagaatcctgaaaaaggatgccaaacctacaaaacccagaataaat

SEQ ID NO: 738 - RNA, 89 nt, synthetic construct
  source 1..89: mol_type = other RNA
acagcttatttggaagctgaaatgtgaggtttataacactcacaagaatcctgaaaaaggatgccaaactctgcttgcttgggtggggc

SEQ ID NO: 739 - RNA, 89 nt, synthetic construct
  source 1..89: mol_type = other RNA
acagcttatttggaagctgaaatgtgaggtttataacactcacaagaatcctgaaaaaggatgccaaacggtggggctggtgctcaagg

SEQ ID NO: 740 - RNA, 89 nt, synthetic construct
  source 1..89: mol_type = other RNA
acagcttatttggaagctgaaatgtgaggtttataacactcacaagaatcctgaaaaaggatgccaaacaaaaggcaacagagaggaca

SEQ ID NO: 741 - RNA, 89 nt, synthetic construct
  source 1..89: mol_type = other RNA
acagcttatttggaagctgaaatgtgaggtttataacactcacaagaatcctgaaaaaggatgccaaacataaaaatgctacaaaaccc

SEQ ID NO: 742 - RNA, 89 nt, synthetic construct
  source 1..89: mol_type = other RNA
acagcttatttggaagctgaaatgtgaggtttataacactcacaagaatcctgaaaaaggatgccaaacgtctgtgttccccttcccag

SEQ ID NO: 743 - RNA, 89 nt, synthetic construct
  source 1..89: mol_type = other RNA
acagcttatttggaagctgaaatgtgaggtttataacactcacaagaatcctgaaaaaggatgccaaacttccccttcccagcctcact

SEQ ID NO: 744 - RNA, 89 nt, synthetic construct
  source 1..89: mol_type = other RNA
acagcttatttggaagctgaaatgtgaggtttataacactcacaagaatcctgaaaaaggatgccaaactaaaaaggcaacagagagga

SEQ ID NO: 745 - RNA, 89 nt, synthetic construct
  source 1..89: mol_type = other RNA
acagcttatttggaagctgaaatgtgaggtttataacactcacaagaatcctgaaaaaggatgccaaactcttcaagttacaaaagcaa

SEQ ID NO: 746 - RNA, 89 nt, synthetic construct
  source 1..89: mol_type = other RNA
acagcttatttggaagctgaaatgtgaggtttataacactcacaagaatcctgaaaaaggatgccaaacgtgctcaaggagggacagtt

SEQ ID NO: 747 - RNA, 89 nt, synthetic construct
  source 1..89: mol_type = other RNA
acagcttatttggaagctgaaatgtgaggtttataacactcacaagaatcctgaaaaaggatgccaaacgggctggtgctcaaggaggg

SEQ ID NO: 748 - RNA, 89 nt, synthetic construct
  source 1..89: mol_type = other RNA
acagcttatttggaagctgaaatgtgaggtttataacactcacaagaatcctgaaaaaggatgccaaaccttgggtggggctggtgctc

SEQ ID NO: 749 - RNA, 89 nt, synthetic construct
  source 1..89: mol_type = other RNA
acagcttatttggaagctgaaatgtgaggtttataacactcacaagaatcctgaaaaaggatgccaaaccaaaacccagaataaatatc

SEQ ID NO: 750 - RNA, 89 nt, synthetic construct
  source 1..89: mol_type = other RNA
acagcttatttggaagctgaaatgtgaggtttataacactcacaagaatcctgaaaaaggatgccaaactgttccccttcccagcctca

SEQ ID NO: 751 - RNA, 89 nt, synthetic construct
  source 1..89: mol_type = other RNA
acagcttatttggaagctgaaatgtgaggtttataacactcacaagaatcctgaaaaaggatgccaaacgacctgttttgcttttgtaa

SEQ ID NO: 752 - RNA, 89 nt, synthetic construct
  source 1..89: mol_type = other RNA
acagcttatttggaagctgaaatgtgaggtttataacactcacaagaatcctgaaaaaggatgccaaaccttttgtaacttgaagatat

SEQ ID NO: 753 - RNA, 89 nt, synthetic construct
  source 1..89: mol_type = other RNA
acagcttatttggaagctgaaatgtgaggtttataacactcacaagaatcctgaaaaaggatgccaaactcctctctgttgccttttta

SEQ ID NO: 754 - RNA, 89 nt, synthetic construct
  source 1..89: mol_type = other RNA
acagcttatttggaagctgaaatgtgaggtttataacactcacaagaatcctgaaaaaggatgccaaacggtctgtcctctctgttgcc

SEQ ID NO: 755 - RNA, 89 nt, synthetic construct
  source 1..89: mol_type = other RNA
acagcttatttggaagctgaaatgtgaggtttataacactcacaagaatcctgaaaaaggatgccaaacttctgggttttgtagcattt

SEQ ID NO: 756 - RNA, 89 nt, synthetic construct
  source 1..89: mol_type = other RNA
acagcttatttggaagctgaaatgtgaggtttataacactcacaagaatcctgaaaaaggatgccaaactccctccttgagcaccagcc

SEQ ID NO: 757 - RNA, 89 nt, synthetic construct
  source 1..89: mol_type = other RNA
acagcttatttggaagctgaaatgtgaggtttataacactcacaagaatcctgaaaaaggatgccaaacaagatatttattctgggttt

SEQ ID NO: 758 - RNA, 89 nt, synthetic construct
  source 1..89: mol_type = other RNA
acagcttatttggaagctgaaatgtgaggtttataacactcacaagaatcctgaaaaaggatgccaaactttattctgggttttgtagc

SEQ ID NO: 759 - RNA, 89 nt, synthetic construct
  source 1..89: mol_type = other RNA
acagcttatttggaagctgaaatgtgaggtttataacactcacaagaatcctgaaaaaggatgccaaacacttgaagatatttattctg

SEQ ID NO: 760 - RNA, 89 nt, synthetic construct
  source 1..89: mol_type = other RNA
acagcttatttggaagctgaaatgtgaggtttataacactcacaagaatcctgaaaaaggatgccaaacaggctgggaaggggaacaca

SEQ ID NO: 761 - RNA, 89 nt, synthetic construct
  source 1..89: mol_type = other RNA
acagcttatttggaagctgaaatgtgaggtttataacactcacaagaatcctgaaaaaggatgccaaactcttttgggtctgtcctctc

SEQ ID NO: 762 - RNA, 89 nt, synthetic construct
  source 1..89: mol_type = other RNA
acagcttatttggaagctgaaatgtgaggtttataacactcacaagaatcctgaaaaaggatgccaaacttttgcttttgtaacttgaa

SEQ ID NO: 763 - RNA, 89 nt, synthetic construct
  source 1..89: mol_type = other RNA
acagcttatttggaagctgaaatgtgaggtttataacactcacaagaatcctgaaaaaggatgccaaacggttttgtagcatttttatt

SEQ ID NO: 764 - RNA, 89 nt, synthetic construct
  source 1..89: mol_type = other RNA
acagcttatttggaagctgaaatgtgaggtttataacactcacaagaatcctgaaaaaggatgccaaacagcaccagccccacccaagc

SEQ ID NO: 765 - RNA, 89 nt, synthetic construct
  source 1..89: mol_type = other RNA
acagcttatttggaagctgaaatgtgaggtttataacactcacaagaatcctgaaaaaggatgccaaacggaaggggaacacagaccag

SEQ ID NO: 766 - RNA, 89 nt, synthetic construct
  source 1..89: mol_type = other RNA
acagcttatttggaagctgaaatgtgaggtttataacactcacaagaatcctgaaaaaggatgccaaacccggctccggcagcagatgg

SEQ ID NO: 767 - RNA, 89 nt, synthetic construct
  source 1..89: mol_type = other RNA
acagcttatttggaagctgaaatgtgaggtttataacactcacaagaatcctgaaaaaggatgccaaacggaggtcccagggagggcac

SEQ ID NO: 768 - RNA, 89 nt, synthetic construct
  source 1..89: mol_type = other RNA
acagcttatttggaagctgaaatgtgaggtttataacactcacaagaatcctgaaaaaggatgccaaacggatggggctgtcactggag

SEQ ID NO: 769 - RNA, 89 nt, synthetic construct
  source 1..89: mol_type = other RNA
acagcttatttggaagctgaaatgtgaggtttataacactcacaagaatcctgaaaaaggatgccaaaccagtgccctccctgggacct

SEQ ID NO: 770 - RNA, 89 nt, synthetic construct
  source 1..89: mol_type = other RNA
acagcttatttggaagctgaaatgtgaggtttataacactcacaagaatcctgaaaaaggatgccaaacccatctgctgccggagccgg

SEQ ID NO: 771 - RNA, 89 nt, synthetic construct
  source 1..89: mol_type = other RNA
acagcttatttggaagctgaaatgtgaggtttataacactcacaagaatcctgaaaaaggatgccaaacacagccccatcccaggatgg

SEQ ID NO: 772 - RNA, 89 nt, synthetic construct
  source 1..89: mol_type = other RNA
acagcttatttggaagctgaaatgtgaggtttataacactcacaagaatcctgaaaaaggatgccaaacctgccggagccggcacctgg

SEQ ID NO: 773 - protein, 448 aa, unidentified
  REGION 1..448: note = CasM.265466
MSVLTRKVQLIPVGDKEERDRVYKYLRDGIEAQNRAMNLYMSGLYFAAINEASKEDRKELNQLYSRIATSSKGSAYTTDIEFPTGLASTSTLSMAVRQDFTKSLKDGLMYGRVSLPTYRKDNPLFVDVRFVALRGTKQKYNGLYHEYKSHTEFLDNLYSSDLKVYIKFANDITFQVIFGNPRKSSALRSEFQNIFEEYYKVCQSSIQFSGTKIILNMAMDIPDKEIELDEDVCVGVDLGIAIPAVCALNKNRYSRVSIGSKEDFLRVRTKIRNQRKRLQTNLKSSNGGHGRKKKMKPMDRFRDYEANWVQNYNHYVSRQVVDFAVKNKAKYINLENLEGIRDDVKNEWLLSNWSYYQLQQYITYKAKTYGIEVRKINPYHTSQRCSCCGYEDAGNRPKKEKGQAYFKCLKCGEEMNADFNAARNIAMSTEFQSGKKTKKQKKEQHENK

SEQ ID NO: 774 - protein, 504 aa, synthetic construct
  REGION 1..504: note = 3x Flag-SV40NLS-CasM.265466-nucleoplasmin NLS
MDYKDHDGDYKDHDIDYKDDDDKMAPKKKRKVGIHGVPAAMSVLTRKVQLIPVGDKEERDRVYKYLRDGIEAQNRAMNLYMSGLYFAAINEASKEDRKELNQLYSRIATSSKGSAYTTDIEFPTGLASTSTLSMAVRQDFTKSLKDGLMYGRVSLPTYRKDNPLFVDVRFVALRGTKQKYNGLYHEYKSHTEFLDNLYSSDLKVYIKFANDITFQVIFGNPRKSSALRSEFQNIFEEYYKVCQSSIQFSGTKIILNMAMDIPDKEIELDEDVCVGVDLGIAIPAVCALNKNRYSRVSIGSKEDFLRVRTKIRNQRKRLQTNLKSSNGGHGRKKKMKPMDRFRDYEANWVQNYNHYVSRQVVDFAVKNKAKYINLENLEGIRDDVKNEWLLSNWSYYQLQQYITYKAKTYGIEVRKINPYHTSQRCSCCGYEDAGNRPKKEKGQAYFKCLKCGEEMNADFNAARNIAMSTEFQSGKKTKKQKKEQHENKKRPAATKKAGQAKKKK

SEQ ID NO: 775 - protein, 448 aa, synthetic construct
  REGION 1..448: note = CasM.265 466 D220R
MSVLTRKVQLIPVGDKEERDRVYKYLRDGIEAQNRAMNLYMSGLYFAAINEASKEDRKELNQLYSRIATSSKGSAYTTDIEFPTGLASTSTLSMAVRQDFTKSLKDGLMYGRVSLPTYRKDNPLFVDVRFVALRGTKQKYNGLYHEYKSHTEFLDNLYSSDLKVYIKFANDITFQVIFGNPRKSSALRSEFQNIFEEYYKVCQSSIQFSGTKIILNMAMRIPDKEIELDEDVCVGVDLGIAIPAVCALNKNRYSRVSIGSKEDFLRVRTKIRNQRKRLQTNLKSSNGGHGRKKKMKPMDRFRDYEANWVQNYNHYVSRQVVDFAVKNKAKYINLENLEGIRDDVKNEWLLSNWSYYQLQQYITYKAKTYGIEVRKINPYHTSQRCSCCGYEDAGNRPKKEKGQAYFKCLKCGEEMNADFNAARNIAMSTEFQSGKKTKKQKKEQHENK

SEQ ID NO: 776 - protein, 448 aa, synthetic construct
  REGION 1..448: note = CasM.265466 K58W
MSVLTRKVQLIPVGDKEERDRVYKYLRDGIEAQNRAMNLYMSGLYFAAINEASKEDRWELNQLYSRIATSSKGSAYTTDIEFPTGLASTSTLSMAVRQDFTKSLKDGLMYGRVSLPTYRKDNPLFVDVRFVALRGTKQKYNGLYHEYKSHTEFLDNLYSSDLKVYIKFANDITFQVIFGNPRKSSALRSEFQNIFEEYYKVCQSSIQFSGTKIILNMAMDIPDKEIELDEDVCVGVDLGIAIPAVCALNKNRYSRVSIGSKEDFLRVRTKIRNQRKRLQTNLKSSNGGHGRKKKMKPMDRFRDYEANWVQNYNHYVSRQVVDFAVKNKAKYINLENLEGIRDDVKNEWLLSNWSYYQLQQYITYKAKTYGIEVRKINPYHTSQRCSCCGYEDAGNRPKKEKGQAYFKCLKCGEEMNADFNAARNIAMSTEFQSGKKTKKQKKEQHENK

SEQ ID NO: 777 - skipped

SEQ ID NO: 778 - protein, 448 aa, synthetic construct
  REGION 1..448: note = CasM.265466 A218K
MSVLTRKVQLIPVGDKEERDRVYKYLRDGIEAQNRAMNLYMSGLYFAAINEASKEDRKELNQLYSRIATSSKGSAYTTDIEFPTGLASTSTLSMAVRQDFTKSLKDGLMYGRVSLPTYRKDNPLFVDVRFVALRGTKQKYNGLYHEYKSHTEFLDNLYSSDLKVYIKFANDITFQVIFGNPRKSSALRSEFQNIFEEYYKVCQSSIQFSGTKIILNMKMDIPDKEIELDEDVCVGVDLGIAIPAVCALNKNRYSRVSIGSKEDFLRVRTKIRNQRKRLQTNLKSSNGGHGRKKKMKPMDRFRDYEANWVQNYNHYVSRQVVDFAVKNKAKYINLENLEGIRDDVKNEWLLSNWSYYQLQQYITYKAKTYGIEVRKINPYHTSQRCSCCGYEDAGNRPKKEKGQAYFKCLKCGEEMNADFNAARNIAMSTEFQSGKKTKKQKKEQHENK

SEQ ID NO: 779 - protein, 448 aa, synthetic construct
  REGION 1..448: note = CasM.265466 M295W
MSVLTRKVQLIPVGDKEERDRVYKYLRDGIEAQNRAMNLYMSGLYFAAINEASKEDRKELNQLYSRIATSSKGSAYTTDIEFPTGLASTSTLSMAVRQDFTKSLKDGLMYGRVSLPTYRKDNPLFVDVRFVALRGTKQKYNGLYHEYKSHTEFLDNLYSSDLKVYIKFANDITFQVIFGNPRKSSALRSEFQNIFEEYYKVCQSSIQFSGTKIILNMAMDIPDKEIELDEDVCVGVDLGIAIPAVCALNKNRYSRVSIGSKEDFLRVRTKIRNQRKRLQTNLKSSNGGHGRKKKWKPMDRFRDYEANWVQNYNHYVSRQVVDFAVKNKAKYINLENLEGIRDDVKNEWLLSNWSYYQLQQYITYKAKTYGIEVRKINPYHTSQRCSCCGYEDAGNRPKKEKGQAYFKCLKCGEEMNADFNAARNIAMSTEFQSGKKTKKQKKEQHENK

SEQ ID NO: 780 - protein, 448 aa, synthetic construct
  REGION 1..448: note = CasM.265466 M298L
MSVLTRKVQLIPVGDKEERDRVYKYLRDGIEAQNRAMNLYMSGLYFAAINEASKEDRKELNQLYSRIATSSKGSAYTTDIEFPTGLASTSTLSMAVRQDFTKSLKDGLMYGRVSLPTYRKDNPLFVDVRFVALRGTKQKYNGLYHEYKSHTEFLDNLYSSDLKVYIKFANDITFQVIFGNPRKSSALRSEFQNIFEEYYKVCQSSIQFSGTKIILNMAMDIPDKEIELDEDVCVGVDLGIAIPAVCALNKNRYSRVSIGSKEDFLRVRTKIRNQRKRLQTNLKSSNGGHGRKKKMKPLDRFRDYEANWVQNYNHYVSRQVVDFAVKNKAKYINLENLEGIRDDVKNEWLLSNWSYYQLQQYITYKAKTYGIEVRKINPYHTSQRCSCCGYEDAGNRPKKEKGQAYFKCLKCGEEMNADFNAARNIAMSTEFQSGKKTKKQKKEQHENK

SEQ ID NO: 781 - protein, 448 aa, synthetic construct
  REGION 1..448: note = CasM.265466 N193K
MSVLTRKVQLIPVGDKEERDRVYKYLRDGIEAQNRAMNLYMSGLYFAAINEASKEDRKELNQLYSRIATSSKGSAYTTDIEFPTGLASTSTLSMAVRQDFTKSLKDGLMYGRVSLPTYRKDNPLFVDVRFVALRGTKQKYNGLYHEYKSHTEFLDNLYSSDLKVYIKFANDITFQVIFGNPRKSSALRSEFQKIFEEYYKVCQSSIQFSGTKIILNMAMDIPDKEIELDEDVCVGVDLGIAIPAVCALNKNRYSRVSIGSKEDFLRVRTKIRNQRKRLQTNLKSSNGGHGRKKKMKPMDRFRDYEANWVQNYNHYVSRQVVDFAVKNKAKYINLENLEGIRDDVKNEWLLSNWSYYQLQQYITYKAKTYGIEVRKINPYHTSQRCSCCGYEDAGNRPKKEKGQAYFKCLKCGEEMNADFNAARNIAMSTEFQSGKKTKKQKKEQHENK

SEQ ID NO: 782 - protein, 448 aa, synthetic construct
  REGION 1..448: note = CasM.265466 Y315M
MSVLTRKVQLIPVGDKEERDRVYKYLRDGIEAQNRAMNLYMSGLYFAAINEASKEDRKELNQLYSRIATSSKGSAYTTDIEFPTGLASTSTLSMAVRQDFTKSLKDGLMYGRVSLPTYRKDNPLFVDVRFVALRGTKQKYNGLYHEYKSHTEFLDNLYSSDLKVYIKFANDITFQVIFGNPRKSSALRSEFQNIFEEYYKVCQSSIQFSGTKIILNMAMDIPDKEIELDEDVCVGVDLGIAIPAVCALNKNRYSRVSIGSKEDFLRVRTKIRNQRKRLQTNLKSSNGGHGRKKKMKPMDRFRDYEANWVQNYNHMVSRQVVDFAVKNKAKYINLENLEGIRDDVKNEWLLSNWSYYQLQQYITYKAKTYGIEVRKINPYHTSQRCSCCGYEDAGNRPKKEKGQAYFKCLKCGEEMNADFNAARNIAMSTEFQSGKKTKKQKKEQHENK

SEQ ID NO: 783 - protein, 448 aa, synthetic construct
  REGION 1..448: note = CasM.265466 S209F
MSVLTRKVQLIPVGDKEERDRVYKYLRDGIEAQNRAMNLYMSGLYFAAINEASKEDRKELNQLYSRIATSSKGSAYTTDIEFPTGLASTSTLSMAVRQDFTKSLKDGLMYGRVSLPTYRKDNPLFVDVRFVALRGTKQKYNGLYHEYKSHTEFLDNLYSSDLKVYIKFANDITFQVIFGNPRKSSALRSEFQNIFEEYYKVCQSSIQFFGTKIILNMAMDIPDKEIELDEDVCVGVDLGIAIPAVCALNKNRYSRVSIGSKEDFLRVRTKIRNQRKRLQTNLKSSNGGHGRKKKMKPMDRFRDYEANWVQNYNHYVSRQVVDFAVKNKAKYINLENLEGIRDDVKNEWLLSNWSYYQLQQYITYKAKTYGIEVRKINPYHTSQRCSCCGYEDAGNRPKKEKGQAYFKCLKCGEEMNADFNAARNIAMSTEFQSGKKTKKQKKEQHENK

SEQ ID NO: 784 - protein, 448 aa, synthetic construct
  REGION 1..448: note = CasM.265466 I80K
MSVLTRKVQLIPVGDKEERDRVYKYLRDGIEAQNRAMNLYMSGLYFAAINEASKEDRKELNQLYSRIATSSKGSAYTTDKEFPTGLASTSTLSMAVRQDFTKSLKDGLMYGRVSLPTYRKDNPLFVDVRFVALRGTKQKYNGLYHEYKSHTEFLDNLYSSDLKVYIKFANDITFQVIFGNPRKSSALRSEFQNIFEEYYKVCQSSIQFSGTKIILNMAMDIPDKEIELDEDVCVGVDLGIAIPAVCALNKNRYSRVSIGSKEDFLRVRTKIRNQRKRLQTNLKSSNGGHGRKKKMKPMDRFRDYEANWVQNYNHYVSRQVVDFAVKNKAKYINLENLEGIRDDVKNEWLLSNWSYYQLQQYITYKAKTYGIEVRKINPYHTSQRCSCCGYEDAGNRPKKEKGQAYFKCLKCGEEMNADFNAARNIAMSTEFQSGKKTKKQKKEQHENK

SEQ ID NO: 785 - protein, 448 aa, synthetic construct
  REGION 1..448: note = CasM.265466 E225K
MSVLTRKVQLIPVGDKEERDRVYKYLRDGIEAQNRAMNLYMSGLYFAAINEASKEDRKELNQLYSRIATSSKGSAYTTDIEFPTGLASTSTLSMAVRQDFTKSLKDGLMYGRVSLPTYRKDNPLFVDVRFVALRGTKQKYNGLYHEYKSHTEFLDNLYSSDLKVYIKFANDITFQVIFGNPRKSSALRSEFQNIFEEYYKVCQSSIQFSGTKIILNMAMDIPDKKIELDEDVCVGVDLGIAIPAVCALNKNRYSRVSIGSKEDFLRVRTKIRNQRKRLQTNLKSSNGGHGRKKKMKPMDRFRDYEANWVQNYNHYVSRQVVDFAVKNKAKYINLENLEGIRDDVKNEWLLSNWSYYQLQQYITYKAKTYGIEVRKINPYHTSQRCSCCGYEDAGNRPKKEKGQAYFKCLKCGEEMNADFNAARNIAMSTEFQSGKKTKKQKKEQHENK

SEQ ID NO: 786 - protein, 448 aa, synthetic construct
  REGION 1..448: note = CasM.265466 N286K
MSVLTRKVQLIPVGDKEERDRVYKYLRDGIEAQNRAMNLYMSGLYFAAINEASKEDRKELNQLYSRIATSSKGSAYTTDIEFPTGLASTSTLSMAVRQDFTKSLKDGLMYGRVSLPTYRKDNPLFVDVRFVALRGTKQKYNGLYHEYKSHTEFLDNLYSSDLKVYIKFANDITFQVIFGNPRKSSALRSEFQNIFEEYYKVCQSSIQFSGTKIILNMAMDIPDKEIELDEDVCVGVDLGIAIPAVCALNKNRYSRVSIGSKEDFLRVRTKIRNQRKRLQTNLKSSKGGHGRKKKMKPMDRFRDYEANWVQNYNHYVSRQVVDFAVKNKAKYINLENLEGIRDDVKNEWLLSNWSYYQLQQYITYKAKTYGIEVRKINPYHTSQRCSCCGYEDAGNRPKKEKGQAYFKCLKCGEEMNADFNAARNIAMSTEFQSGKKTKKQKKEQHENK

SEQ ID NO: 787 - protein, 448 aa, synthetic construct
  REGION 1..448: note = CasM.265466 A306K
MSVLTRKVQLIPVGDKEERDRVYKYLRDGIEAQNRAMNLYMSGLYFAAINEASKEDRKELNQLYSRIATSSKGSAYTTDIEFPTGLASTSTLSMAVRQDFTKSLKDGLMYGRVSLPTYRKDNPLFVDVRFVALRGTKQKYNGLYHEYKSHTEFLDNLYSSDLKVYIKFANDITFQVIFGNPRKSSALRSEFQNIFEEYYKVCQSSIQFSGTKIILNMAMDIPDKEIELDEDVCVGVDLGIAIPAVCALNKNRYSRVSIGSKEDFLRVRTKIRNQRKRLQTNLKSSNGGHGRKKKMKPMDRFRDYEKNWVQNYNHYVSRQVVDFAVKNKAKYINLENLEGIRDDVKNEWLLSNWSYYQLQQYITYKAKTYGIEVRKINPYHTSQRCSCCGYEDAGNRPKKEKGQAYFKCLKCGEEMNADFNAARNIAMSTEFQSGKKTKKQKKEQHENK

SEQ ID NO: 788 - protein, 448 aa, synthetic construct
  REGION 1..448: note = CasM.265466 E335Q
MSVLTRKVQLIPVGDKEERDRVYKYLRDGIEAQNRAMNLYMSGLYFAAINEASKEDRKELNQLYSRIATSSKGSAYTTDIEFPTGLASTSTLSMAVRQDFTKSLKDGLMYGRVSLPTYRKDNPLFVDVRFVALRGTKQKYNGLYHEYKSHTEFLDNLYSSDLKVYIKFANDITFQVIFGNPRKSSALRSEFQNIFEEYYKVCQSSIQFSGTKIILNMAMDIPDKEIELDEDVCVGVDLGIAIPAVCALNKNRYSRVSIGSKEDFLRVRTKIRNQRKRLQTNLKSSNGGHGRKKKMKPMDRFRDYEANWVQNYNHYVSRQVVDFAVKNKAKYINLQNLEGIRDDVKNEWLLSNWSYYQLQQYITYKAKTYGIEVRKINPYHTSQRCSCCGYEDAGNRPKKEKGQAYFKCLKCGEEMNADFNAARNIAMSTEFQSGKKTKKQKKEQHENK

SEQ ID NO: 789 - protein, 448 aa, synthetic construct
  REGION 1..448: note = CasM.265466 D237A
MSVLTRKVQLIPVGDKEERDRVYKYLRDGIEAQNRAMNLYMSGLYFAAINEASKEDRKELNQLYSRIATSSKGSAYTTDIEFPTGLASTSTLSMAVRQDFTKSLKDGLMYGRVSLPTYRKDNPLFVDVRFVALRGTKQKYNGLYHEYKSHTEFLDNLYSSDLKVYIKFANDITFQVIFGNPRKSSALRSEFQNIFEEYYKVCQSSIQFSGTKIILNMAMDIPDKEIELDEDVCVGVALGIAIPAVCALNKNRYSRVSIGSKEDFLRVRTKIRNQRKRLQTNLKSSNGGHGRKKKMKPMDRFRDYEANWVQNYNHYVSRQVVDFAVKNKAKYINLENLEGIRDDVKNEWLLSNWSYYQLQQYITYKAKTYGIEVRKINPYHTSQRCSCCGYEDAGNRPKKEKGQAYFKCLKCGEEMNADFNAARNIAMSTEFQSGKKTKKQKKEQHENK

SEQ ID NO: 790 - protein, 448 aa, synthetic construct
  REGION 1..448: note = CasM.265466 D418A
MSVLTRKVQLIPVGDKEERDRVYKYLRDGIEAQNRAMNLYMSGLYFAAINEASKEDRKELNQLYSRIATSSKGSAYTTDIEFPTGLASTSTLSMAVRQDFTKSLKDGLMYGRVSLPTYRKDNPLFVDVRFVALRGTKQKYNGLYHEYKSHTEFLDNLYSSDLKVYIKFANDITFQVIFGNPRKSSALRSEFQNIFEEYYKVCQSSIQFSGTKIILNMAMDIPDKEIELDEDVCVGVDLGIAIPAVCALNKNRYSRVSIGSKEDFLRVRTKIRNQRKRLQTNLKSSNGGHGRKKKMKPMDRFRDYEANWVQNYNHYVSRQVVDFAVKNKAKYINLENLEGIRDDVKNEWLLSNWSYYQLQQYITYKAKTYGIEVRKINPYHTSQRCSCCGYEDAGNRPKKEKGQAYFKCLKCGEEMNAAFNAARNIAMSTEFQSGKKTKKQKKEQHENK

SEQ ID NO: 791 - protein, 448 aa, synthetic construct
  REGION 1..448: note = CasM.265466 D418N
MSVLTRKVQLIPVGDKEERDRVYKYLRDGIEAQNRAMNLYMSGLYFAAINEASKEDRKELNQLYSRIATSSKGSAYTTDIEFPTGLASTSTLSMAVRQDFTKSLKDGLMYGRVSLPTYRKDNPLFVDVRFVALRGTKQKYNGLYHEYKSHTEFLDNLYSSDLKVYIKFANDITFQVIFGNPRKSSALRSEFQNIFEEYYKVCQSSIQFSGTKIILNMAMDIPDKEIELDEDVCVGVDLGIAIPAVCALNKNRYSRVSIGSKEDFLRVRTKIRNQRKRLQTNLKSSNGGHGRKKKMKPMDRFRDYEANWVQNYNHYVSRQVVDFAVKNKAKYINLENLEGIRDDVKNEWLLSNWSYYQLQQYITYKAKTYGIEVRKINPYHTSQRCSCCGYEDAGNRPKKEKGQAYFKCLKCGEEMNANFNAARNIAMSTEFQSGKKTKKQKKEQHENK

SEQ ID NO: 792 - protein, 448 aa, synthetic construct
  REGION 1..448: note = CasM.265466 E335A
MSVLTRKVQLIPVGDKEERDRVYKYLRDGIEAQNRAMNLYMSGLYFAAINEASKEDRKELNQLYSRIATSSKGSAYTTDIEFPTGLASTSTLSMAVRQDFTKSLKDGLMYGRVSLPTYRKDNPLFVDVRFVALRGTKQKYNGLYHEYKSHTEFLDNLYSSDLKVYIKFANDITFQVIFGNPRKSSALRSEFQNIFEEYYKVCQSSIQFSGTKIILNMAMDIPDKEIELDEDVCVGVDLGIAIPAVCALNKNRYSRVSIGSKEDFLRVRTKIRNQRKRLQTNLKSSNGGHGRKKKMKPMDRFRDYEANWVQNYNHYVSRQVVDFAVKNKAKYINLANLEGIRDDVKNEWLLSNWSYYQLQQYITYKAKTYGIEVRKINPYHTSQRCSCCGYEDAGNRPKKEKGQAYFKCLKCGEEMNADFNAARNIAMSTEFQSGKKTKKQKKEQHENK

SEQ ID NO: 793 - protein, 448 aa, synthetic construct
  REGION 1..448: note = CasM D220R-E335Q
MSVLTRKVQLIPVGDKEERDRVYKYLRDGIEAQNRAMNLYMSGLYFAAINEASKEDRKELNQLYSRIATSSKGSAYTTDIEFPTGLASTSTLSMAVRQDFTKSLKDGLMYGRVSLPTYRKDNPLFVDVRFVALRGTKQKYNGLYHEYKSHTEFLDNLYSSDLKVYIKFANDITFQVIFGNPRKSSALRSEFQNIFEEYYKVCQSSIQFSGTKIILNMAMRIPDKEIELDEDVCVGVDLGIAIPAVCALNKNRYSRVSIGSKEDFLRVRTKIRNQRKRLQTNLKSSNGGHGRKKKMKPMDRFRDYEANWVQNYNHYVSRQVVDFAVKNKAKYINLQNLEGIRDDVKNEWLLSNWSYYQLQQYITYKAKTYGIEVRKINPYHTSQRCSCCGYEDAGNRPKKEKGQAYFKCLKCGEEMNADFNAARNIAMSTEFQSGKKTKKQKKEQHENK

SEQ ID NO: 794 - protein, 717 aa, synthetic construct
  REGION 1..717: note = CasPhi.12-L26K-E567Q
MIKPTVSQFLTPGFKLIRNHSRTAGKKLKNEGEEACKKFVRENEIPKDECPNFQGGPAIANIIAKSREFTEWEIYQSSLAIQEVIFTLPKDKLPEPILKEEWRAQWLSEHGLDTVPYKEAAGLNLIIKNAVNTYKGVQVKVDNKNKNNLAKINRKNEIAKLNGEQEISFEEIKAFDDKGYLLQKPSPNKSIYCYQSVSPKPFITSKYHNVNLPEEYIGYYRKSNEPIVSPYQFDRLRIPIGEPGYVPKWQYTFLSKKENKRRKLSKRIKNVSPILGIICIKKDWCVFDMRGLLRTNHWKKYHKPTDSINDLFDYFTGDPVIDTKANVVRFRYKMENGIVNYKPVREKKGKELLENICDQNGSCKLATVDVGQNNPVAIGLFELKKVNGELTKTLISRHPTPIDFCNKITAYRERYDKLESSIKLDAIKQLTSEQKIEVDNYNNNFTPQNTKQIVCSKLNINPNDLPWDKMISGTHFISEKAQVSNKSEIYFTSTDKGKTKDVMKSDYKWFQDYKPKLSKEVRDALSDIEWRLRRESLEFNKLSKSREQDARQLANWISSMCDVIGIQNLVKKNNFFGGSGKREPGWDNFYKPKKENRWWINAIHKALTELSQNKGKRVILLPAMRTSITCPKCKYCDSKNRNGEKFNCLKCGIELNADIDVATENLATVAITAQSMPKPTCERSGDAKKPVRARKAKAPEFHDKLAPSYTVVLREAV

SEQ ID NO: 795 - protein, 50 aa, synthetic construct
GSSGGSPAGSPTSTEEGTSESATPESGPGTSTEPSEGSAPGSPAGSGGGS

SEQ ID NO: 796 - protein, 166 aa, Escherichia coli
SEVEFSHEYWMRHALTLAKRARDEREVPVGAVLVLNNRVIGEGWNRAIGLHDPTAHAEIMALRQGGLVMQNYRLIDATLYVTFEPCVMCAGAMIHSRIGRVVFGVRNSKRGAAGSLMNVLNYPGMNHRVEITEGILADECAALLCDFYRMPRQVFNAQKKAQSSIN

SEQ ID NO: 797 - protein, 664 aa, synthetic construct
  REGION 1..664: note = Cas.265466-D220R-E335Q_ABE8e fusion
MSVLTRKVQLIPVGDKEERDRVYKYLRDGIEAQNRAMNLYMSGLYFAAINEASKEDRKELNQLYSRIATSSKGSAYTTDIEFPTGLASTSTLSMAVRQDFTKSLKDGLMYGRVSLPTYRKDNPLFVDVRFVALRGTKQKYNGLYHEYKSHTEFLDNLYSSDLKVYIKFANDITFQVIFGNPRKSSALRSEFQNIFEEYYKVCQSSIQFSGTKIILNMAMRIPDKEIELDEDVCVGVDLGIAIPAVCALNKNRYSRVSIGSKEDFLRVRTKIRNQRKRLQTNLKSSNGGHGRKKKMKPMDRFRDYEANWVQNYNHYVSRQVVDFAVKNKAKYINLQNLEGIRDDVKNEWLLSNWSYYQLQQYITYKAKTYGIEVRKINPYHTSQRCSCCGYEDAGNRPKKEKGQAYFKCLKCGEEMNADFNAARNIAMSTEFQSGKKTKKQKKEQHENKGSSGGSPAGSPTSTEEGTSESATPESGPGTSTEPSEGSAPGSPAGSGGGSSEVEFSHEYWMRHALTLAKRARDEREVPVGAVLVLNNRVIGEGWNRAIGLHDPTAHAEIMALRQGGLVMQNYRLIDATLYVTFEPCVMCAGAMIHSRIGRVVFGVRNSKRGAAGSLMNVLNYPGMNHRVEITEGILADECAALLCDFYRMPRQVFNAQKKAQSSIN

SEQ ID NO: 798 - protein, 933 aa, synthetic construct
  REGION 1..933: note = CasPhi.12-L26K-E567Q_ABE8e fusion
MIKPTVSQFLTPGFKLIRNHSRTAGKKLKNEGEEACKKFVRENEIPKDECPNFQGGPAIANIIAKSREFTEWEIYQSSLAIQEVIFTLPKDKLPEPILKEEWRAQWLSEHGLDTVPYKEAAGLNLIIKNAVNTYKGVQVKVDNKNKNNLAKINRKNEIAKLNGEQEISFEEIKAFDDKGYLLQKPSPNKSIYCYQSVSPKPFITSKYHNVNLPEEYIGYYRKSNEPIVSPYQFDRLRIPIGEPGYVPKWQYTFLSKKENKRRKLSKRIKNVSPILGIICIKKDWCVFDMRGLLRTNHWKKYHKPTDSINDLFDYFTGDPVIDTKANVVRFRYKMENGIVNYKPVREKKGKELLENICDQNGSCKLATVDVGQNNPVAIGLFELKKVNGELTKTLISRHPTPIDFCNKITAYRERYDKLESSIKLDAIKQLTSEQKIEVDNYNNNFTPQNTKQIVCSKLNINPNDLPWDKMISGTHFISEKAQVSNKSEIYFTSTDKGKTKDVMKSDYKWFQDYKPKLSKEVRDALSDIEWRLRRESLEFNKLSKSREQDARQLANWISSMCDVIGIQNLVKKNNFFGGSGKREPGWDNFYKPKKENRWWINAIHKALTELSQNKGKRVILLPAMRTSITCPKCKYCDSKNRNGEKFNCLKCGIELNADIDVATENLATVAITAQSMPKPTCERSGDAKKPVRARKAKAPEFHDKLAPSYTVVLREAVGSSGGSPAGSPTSTEEGTSESATPESGPGTSTEPSEGSAPGSPAGSGGGSSEVEFSHEYWMRHALTLAKRARDEREVPVGAVLVLNNRVIGEGWNRAIGLHDPTAHAEIMALRQGGLVMQNYRLIDATLYVTFEPCVMCAGAMIHSRIGRVVFGVRNSKRGAAGSLMNVLNYPGMNHRVEITEGILADECAALLCDFYRMPRQVFNAQKKAQSSIN

SEQ ID NO: 799 - RNA, 20 nt, synthetic construct
  source 1..20: mol_type = other RNA
acccacctgtgccgcggcga

SEQ ID NO: 800 - RNA, 20 nt, synthetic construct
  source 1..20: mol_type = other RNA
catggggccaggatccgtgg

SEQ ID NO: 801 - RNA, 20 nt, synthetic construct
  source 1..20: mol_type = other RNA
tgcaggccttgaagttgccc

SEQ ID NO: 802 - RNA, 20 nt, synthetic construct
  source 1..20: mol_type = other RNA
gtcgagcaggccagcaagtg

SEQ ID NO: 803 - RNA, 20 nt, synthetic construct
  source 1..20: mol_type = other RNA
ctcccaggcctggagtttat

SEQ ID NO: 804 - RNA, 20 nt, synthetic construct
  source 1..20: mol_type = other RNA
cttgcaggaacagaggtgcc

SEQ ID NO: 805 - RNA, 20 nt, synthetic construct
  source 1..20: mol_type = other RNA
cctcaggagcttcagaggcc

SEQ ID NO: 806 - RNA, 20 nt, synthetic construct
  source 1..20: mol_type = other RNA
tacttactttaagtgaagtt

SEQ ID NO: 807 - RNA, 20 nt, synthetic construct
  source 1..20: mol_type = other RNA
tatcagctcagaaggactag

SEQ ID NO: 808 - RNA, 20 nt, synthetic construct
  source 1..20: mol_type = other RNA
attctaggcattcctgctga

SEQ ID NO: 809 - RNA, 20 nt, synthetic construct
  source 1..20: mol_type = other RNA
gaaagacggaggcagcctgg

SEQ ID NO: 810 - RNA, 40 nt, synthetic construct
  source 1..40: mol_type = other RNA
attgctccttacgaggagacacccacctgtgccgcggcga

SEQ ID NO: 811 - RNA, 40 nt, synthetic construct
  source 1..40: mol_type = other RNA
attgctccttacgaggagaccatggggccaggatccgtgg

SEQ ID NO: 812 - RNA, 40 nt, synthetic construct
  source 1..40: mol_type = other RNA
attgctccttacgaggagactgcaggccttgaagttgccc

SEQ ID NO: 813 - RNA, 40 nt, synthetic construct
  source 1..40: mol_type = other RNA
attgctccttacgaggagacgtcgagcaggccagcaagtg

SEQ ID NO: 814 - RNA, 40 nt, synthetic construct
  source 1..40: mol_type = other RNA
attgctccttacgaggagacctcccaggcctggagtttat

SEQ ID NO: 815 - RNA, 40 nt, synthetic construct
  source 1..40: mol_type = other RNA
attgctccttacgaggagaccttgcaggaacagaggtgcc

SEQ ID NO: 816 - RNA, 40 nt, synthetic construct
  source 1..40: mol_type = other RNA
attgctccttacgaggagaccctcaggagcttcagaggcc

SEQ ID NO: 817 - RNA, 40 nt, synthetic construct
  source 1..40: mol_type = other RNA
attgctccttacgaggagactacttactttaagtgaagtt

SEQ ID NO: 818 - RNA, 40 nt, synthetic construct
  source 1..40: mol_type = other RNA
attgctccttacgaggagactatcagctcagaaggactag

SEQ ID NO: 819 - RNA, 40 nt, synthetic construct
  source 1..40: mol_type = other RNA
attgctccttacgaggagacattctaggcattcctgctga

SEQ ID NO: 820 - RNA, 40 nt, synthetic construct
  source 1..40: mol_type = other RNA
attgctccttacgaggagacgaaagacggaggcagcctgg

SEQ ID NO: 821 - RNA, 20 nt, synthetic construct
  source 1..20: mol_type = other RNA
caccgcagccacgcagagca

SEQ ID NO: 822 - RNA, 20 nt, synthetic construct
  source 1..20: mol_type = other RNA
tagaaccttgatgacatagc

SEQ ID NO: 823 - RNA, 20 nt, synthetic construct
  source 1..20: mol_type = other RNA
agttctgggatttggaccct

SEQ ID NO: 824 - RNA, 20 nt, synthetic construct
  source 1..20: mol_type = other RNA
gaccctgaggtcagaccaac

SEQ ID NO: 825 - RNA, 20 nt, synthetic construct
  source 1..20: mol_type = other RNA
acctcagggtccaaatccca

SEQ ID NO: 826 - RNA, 89 nt, synthetic construct
  source 1..89: mol_type = other RNA
acagcttatttggaagctgaaatgtgaggtttataacactcacaagaatcctgaaaaaggatgccaaacagttctgggatttggaccct

SEQ ID NO: 827 - RNA, 89 nt, synthetic construct
  source 1..89: mol_type = other RNA
acagcttatttggaagctgaaatgtgaggtttataacactcacaagaatcctgaaaaaggatgccaaacgaccctgaggtcagaccaac

SEQ ID NO: 828 - RNA, 89 nt, synthetic construct
  source 1..89: mol_type = other RNA
acagcttatttggaagctgaaatgtgaggtttataacactcacaagaatcctgaaaaaggatgccaaacacctcagggtccaaatccca

SEQ ID NO: 829 - RNA, 89 nt, synthetic construct
  source 1..89: mol_type = other RNA
acagcttatttggaagctgaaatgtgaggtttataacactcacaagaatcctgaaaaaggatgccaaactagaaccttgatgacatagc

SEQ ID NO: 830 - RNA, 17 nt, synthetic construct
  source 1..17: mol_type = other RNA
cccaactctcccgcccg

SEQ ID NO: 831 - RNA, 17 nt, synthetic construct
  source 1..17: mol_type = other RNA
aggcttagggctggagg

SEQ ID NO: 832 - RNA, 17 nt, synthetic construct
  source 1..17: mol_type = other RNA
ccctctcaccagcctct

SEQ ID NO: 833 - RNA, 17 nt, synthetic construct
  source 1..17: mol_type = other RNA
agggcttggggctggtg

SEQ ID NO: 834 - RNA, 17 nt, synthetic construct
  source 1..17: mol_type = other RNA
ctccaaacaccccccag

SEQ ID NO: 835 - RNA, 17 nt, synthetic construct
  source 1..17: mol_type = other RNA
gggctggaggaagcctt

SEQ ID NO: 836 - RNA, 17 nt, synthetic construct
  source 1..17: mol_type = other RNA
ccaactctcccgcccgc

SEQ ID NO: 837 - RNA, 17 nt, synthetic construct
  source 1..17: mol_type = other RNA
gctggactggacggaga

SEQ ID NO: 838 - RNA, 17 nt, synthetic construct
  source 1..17: mol_type = other RNA
tctgctccatcccaccc

SEQ ID NO: 839 - RNA, 17 nt, synthetic construct
  source 1..17: mol_type = other RNA
cccagcgccctgggtcc

SEQ ID NO: 840 - RNA, 17 nt, synthetic construct
  source 1..17: mol_type = other RNA
tgtgcctttactccaaa

SEQ ID NO: 841 - RNA, 17 nt, synthetic construct
  source 1..17: mol_type = other RNA
ctgcatctggacaccct

SEQ ID NO: 842 - RNA, 17 nt, synthetic construct
  source 1..17: mol_type = other RNA
ctagagctaaggaagcc

SEQ ID NO: 843 - RNA, 17 nt, synthetic construct
  source 1..17: mol_type = other RNA
gcccagcgccctgggtc

SEQ ID NO: 844 - RNA, 17 nt, synthetic construct
  source 1..17: mol_type = other RNA
cagtgtgaaaggctgag

SEQ ID NO: 845 - RNA, 17 nt, synthetic construct
  source 1..17: mol_type = other RNA
ttcaggcttagggctgg

SEQ ID NO: 846 - RNA, 17 nt, synthetic construct
  source 1..17: mol_type = other RNA
gggcctcgatccctcgc

SEQ ID NO: 847 - RNA, 17 nt, synthetic construct
  source 1..17: mol_type = other RNA
actccaaacacccccca

SEQ ID NO: 848 - RNA, 17 nt, synthetic construct
  source 1..17: mol_type = other RNA
agtctggtgggttttct

SEQ ID NO: 849 - RNA, 17 nt, synthetic construct
  source 1..17: mol_type = other RNA
cccaaagctacacaggg

SEQ ID NO: 850 - RNA, 17 nt, synthetic construct
  source 1..17: mol_type = other RNA
tgctccatcccacccac

SEQ ID NO: 851 - RNA, 17 nt, synthetic construct
  source 1..17: mol_type = other RNA
atgttcagtctggtggg

SEQ ID NO: 852 - RNA, 17 nt, synthetic construct
  source 1..17: mol_type = other RNA
ctgctccatcccaccca

SEQ ID NO: 853 - RNA, 17 nt, synthetic construct
  source 1..17: mol_type = other RNA
atccctagaggcagctg

SEQ ID NO: 854 - RNA, 17 nt, synthetic construct
  source 1..17: mol_type = other RNA
gacagcccagtcctacc

SEQ ID NO: 855 - RNA, 17 nt, synthetic construct
  source 1..17: mol_type = other RNA
gggctggtggagggagg

SEQ ID NO: 856 - RNA, 17 nt, synthetic construct
  source 1..17: mol_type = other RNA
ctgagctcatctgggct

SEQ ID NO: 857 - RNA, 17 nt, synthetic construct
  source 1..17: mol_type = other RNA
ggcctcgatccctcgcc

SEQ ID NO: 858 - RNA, 17 nt, synthetic construct
  source 1..17: mol_type = other RNA
tcaagtctgaagaagcc

SEQ ID NO: 859 - RNA, 17 nt, synthetic construct
  source 1..17: mol_type = other RNA
cccctctcaccagcctc

SEQ ID NO: 860 - RNA, 17 nt, synthetic construct
  source 1..17: mol_type = other RNA
ttctcaagtctgaagaa

SEQ ID NO: 861 - RNA, 17 nt, synthetic construct
  source 1..17: mol_type = other RNA
ccccctcattcttcagg

SEQ ID NO: 862 - RNA, 17 nt, synthetic construct
  source 1..17: mol_type = other RNA
ggctggggggtgtttgg

SEQ ID NO: 863 - RNA, 17 nt, synthetic construct
  source 1..17: mol_type = other RNA
ggaaatccctaggagac

SEQ ID NO: 864 - RNA, 17 nt, synthetic construct
  source 1..17: mol_type = other RNA
agaacaagtgggtggct

SEQ ID NO: 865 - RNA, 17 nt, synthetic construct
  source 1..17: mol_type = other RNA
tatcatctccagggcag

SEQ ID NO: 866 - RNA, 17 nt, synthetic construct
  source 1..17: mol_type = other RNA
caggcccctccctccac

SEQ ID NO: 867 - RNA, 17 nt, synthetic construct
  source 1..17: mol_type = other RNA
cctggagcagctgcctc

SEQ ID NO: 868 - RNA, 17 nt, synthetic construct
  source 1..17: mol_type = other RNA
aggttatgatgaggggt

SEQ ID NO: 869 - RNA, 17 nt, synthetic construct
  source 1..17: mol_type = other RNA
ctggctgggctgggcag

SEQ ID NO: 870 - RNA, 17 nt, synthetic construct
  source 1..17: mol_type = other RNA
ctagctgactggctccc

SEQ ID NO: 871 - RNA, 17 nt, synthetic construct
  source 1..17: mol_type = other RNA
ttcagacttgagaacaa

SEQ ID NO: 872 - RNA, 17 nt, synthetic construct
  source 1..17: mol_type = other RNA
gagtaaaggcacagaag

SEQ ID NO: 873 - RNA, 17 nt, synthetic construct
  source 1..17: mol_type = other RNA
ggcaagtgacacccctc

SEQ ID NO: 874 - RNA, 17 nt, synthetic construct
  source 1..17: mol_type = other RNA
tgatgaggggtgggggg

SEQ ID NO: 875 - RNA, 17 nt, synthetic construct
  source 1..17: mol_type = other RNA
tggccctctccaggcct

SEQ ID NO: 876 - RNA, 17 nt, synthetic construct
  source 1..17: mol_type = other RNA
ttcaggttatgatgagg

SEQ ID NO: 877 - RNA, 17 nt, synthetic construct
  source 1..17: mol_type = other RNA
tatatcatctccagggc

SEQ ID NO: 878 - RNA, 17 nt, synthetic construct
  source 1..17: mol_type = other RNA
ccctccccagagggcat

SEQ ID NO: 879 - RNA, 17 nt, synthetic construct
  source 1..17: mol_type = other RNA
cccctcttcatcctcct

SEQ ID NO: 880 - RNA, 17 nt, synthetic construct
  source 1..17: mol_type = other RNA
tccaggcttgctggctg

SEQ ID NO: 881 - RNA, 17 nt, synthetic construct
  source 1..17: mol_type = other RNA
cacactggaatttcagg

SEQ ID NO: 882 - RNA, 17 nt, synthetic construct
  source 1..17: mol_type = other RNA
cctgtctggggtaggac

SEQ ID NO: 883 - RNA, 17 nt, synthetic construct
  source 1..17: mol_type = other RNA
gctctagcaagtgcttc

SEQ ID NO: 884 - RNA, 17 nt, synthetic construct
  source 1..17: mol_type = other RNA
ctggccctctccaggcc

SEQ ID NO: 885 - RNA, 17 nt, synthetic construct
  source 1..17: mol_type = other RNA
agacttgagaacaagtg

SEQ ID NO: 886 - RNA, 17 nt, synthetic construct
  source 1..17: mol_type = other RNA
ggagtaaaggcacagaa

SEQ ID NO: 887 - RNA, 17 nt, synthetic construct
  source 1..17: mol_type = other RNA
cccctccccagagggca

SEQ ID NO: 888 - RNA, 17 nt, synthetic construct
  source 1..17: mol_type = other RNA
gagccacttccagcccc

SEQ ID NO: 889 - RNA, 17 nt, synthetic construct
  source 1..17: mol_type = other RNA
cttcctagctgactggc

SEQ ID NO: 890 - RNA, 17 nt, synthetic construct
  source 1..17: mol_type = other RNA
ctccagccctaagcctg

SEQ ID NO: 891 - RNA, 17 nt, synthetic construct
  source 1..17: mol_type = other RNA
tgacctgttttatatca

SEQ ID NO: 892 - RNA, 17 nt, synthetic construct
  source 1..17: mol_type = other RNA
cagccccaccccctgtg

SEQ ID NO: 893 - RNA, 17 nt, synthetic construct
  source 1..17: mol_type = other RNA
aggcccctccctccacc

SEQ ID NO: 894 - RNA, 17 nt, synthetic construct
  source 1..17: mol_type = other RNA
cttagctctagcaagtg

SEQ ID NO: 895 - RNA, 17 nt, synthetic construct
  source 1..17: mol_type = other RNA
gggcaagtgacacccct

SEQ ID NO: 896 - RNA, 17 nt, synthetic construct
  source 1..17: mol_type = other RNA
ccctgtctggggtagga

SEQ ID NO: 897 - RNA, 17 nt, synthetic construct
  source 1..17: mol_type = other RNA
ggtgatttctggccctc

SEQ ID NO: 898 - RNA, 17 nt, synthetic construct
  source 1..17: mol_type = other RNA
gggtgatttctggccct

SEQ ID NO: 899 - RNA, 17 nt, synthetic construct
  source 1..17: mol_type = other RNA
acactggaatttcaggc

SEQ ID NO: 900 - RNA, 17 nt, synthetic construct
  source 1..17: mol_type = other RNA
gacataggccaggggcc

SEQ ID NO: 901 - RNA, 17 nt, synthetic construct
  source 1..17: mol_type = other RNA
atatcatctccagggca

SEQ ID NO: 902 - RNA, 17 nt, synthetic construct
  source 1..17: mol_type = other RNA
atcctcctcccctcctc

SEQ ID NO: 903 - RNA, 17 nt, synthetic construct
  source 1..17: mol_type = other RNA
tcccactgatattagat

SEQ ID NO: 904 - RNA, 17 nt, synthetic construct
  source 1..17: mol_type = other RNA
tggcccatagcctccct

SEQ ID NO: 905 - RNA, 17 nt, synthetic construct
  source 1..17: mol_type = other RNA
caggcagctctgccact

SEQ ID NO: 906 - RNA, 17 nt, synthetic construct
  source 1..17: mol_type = other RNA
cagtagaatggaatggg

SEQ ID NO: 907 - RNA, 17 nt, synthetic construct
  source 1..17: mol_type = other RNA
tattggctccaggatgg

SEQ ID NO: 908 - RNA, 17 nt, synthetic construct
  source 1..17: mol_type = other RNA
cttcctctcctccccag

SEQ ID NO: 909 - RNA, 17 nt, synthetic construct
  source 1..17: mol_type = other RNA
cagtcctgggtaggcat

SEQ ID NO: 910 - RNA, 17 nt, synthetic construct
  source 1..17: mol_type = other RNA
cctggagtagctagctg

SEQ ID NO: 911 - RNA, 17 nt, synthetic construct
  source 1..17: mol_type = other RNA
cccagcttctagccccc

SEQ ID NO: 912 - RNA, 17 nt, synthetic construct
  source 1..17: mol_type = other RNA
tccctccagctctttgt

SEQ ID NO: 913 - RNA, 17 nt, synthetic construct
  source 1..17: mol_type = other RNA
ccttccttcctctcctc

SEQ ID NO: 914 - RNA, 17 nt, synthetic construct
  source 1..17: mol_type = other RNA
ctcgctaggactcagtt

SEQ ID NO: 915 - RNA, 17 nt, synthetic construct
  source 1..17: mol_type = other RNA
agaaatccctctgagat

SEQ ID NO: 916 - RNA, 17 nt, synthetic construct
  source 1..17: mol_type = other RNA
gtttcttcccttccttc

SEQ ID NO: 917 - RNA, 17 nt, synthetic construct
  source 1..17: mol_type = other RNA
ttcagtcctgggtaggc

SEQ ID NO: 918 - RNA, 17 nt, synthetic construct
  source 1..17: mol_type = other RNA
cccatgcttttcacggc

SEQ ID NO: 919 - RNA, 17 nt, synthetic construct
  source 1..17: mol_type = other RNA
ttcccttccttcctctc

SEQ ID NO: 920 - RNA, 17 nt, synthetic construct
  source 1..17: mol_type = other RNA
catgcccccacactgac

SEQ ID NO: 921 - RNA, 17 nt, synthetic construct
  source 1..17: mol_type = other RNA
cttttcctcgctaggac

SEQ ID NO: 922 - RNA, 17 nt, synthetic construct
  source 1..17: mol_type = other RNA
cctcgctaggactcagt

SEQ ID NO: 923 - RNA, 17 nt, synthetic construct
  source 1..17: mol_type = other RNA
tatattggctccaggat

SEQ ID NO: 924 - RNA, 17 nt, synthetic construct
  source 1..17: mol_type = other RNA
gctccaggatgggacag

SEQ ID NO: 925 - RNA, 17 nt, synthetic construct
  source 1..17: mol_type = other RNA
cacggccacctccgcca

SEQ ID NO: 926 - RNA, 17 nt, synthetic construct
  source 1..17: mol_type = other RNA
tagccccccccacacca

SEQ ID NO: 927 - RNA, 17 nt, synthetic construct
  source 1..17: mol_type = other RNA
tttcagtcctgggtagg

SEQ ID NO: 928 - RNA, 17 nt, synthetic construct
  source 1..17: mol_type = other RNA
ggcccatagcctccctt

SEQ ID NO: 929 - RNA, 17 nt, synthetic construct
  source 1..17: mol_type = other RNA
cttcccttccttcctct

SEQ ID NO: 930 - RNA, 17 nt, synthetic construct
  source 1..17: mol_type = other RNA
gacctcaggcctgcttt

SEQ ID NO: 931 - RNA, 17 nt, synthetic construct
  source 1..17: mol_type = other RNA
ccccagcttctagcccc

SEQ ID NO: 932 - RNA, 17 nt, synthetic construct
  source 1..17: mol_type = other RNA
tttcttcccttccttcc

SEQ ID NO: 933 - RNA, 17 nt, synthetic construct
  source 1..17: mol_type = other RNA
tagggataaaactgagc

SEQ ID NO: 934 - RNA, 17 nt, synthetic construct
  source 1..17: mol_type = other RNA
atattggctccaggatg

SEQ ID NO: 935 - RNA, 17 nt, synthetic construct
  source 1..17: mol_type = other RNA
acggccacctccgccac

SEQ ID NO: 936 - RNA, 17 nt, synthetic construct
  source 1..17: mol_type = other RNA
acagcctagagccagtg

SEQ ID NO: 937 - RNA, 17 nt, synthetic construct
  source 1..17: mol_type = other RNA
acagaagccacctgaaa

SEQ ID NO: 938 - RNA, 17 nt, synthetic construct
  source 1..17: mol_type = other RNA
tcagtcctgggtaggca

SEQ ID NO: 939 - RNA, 17 nt, synthetic construct
  source 1..17: mol_type = other RNA
tcacggccacctccgcc

SEQ ID NO: 940 - RNA, 17 nt, synthetic construct
  source 1..17: mol_type = other RNA
tcctcgctaggactcag

SEQ ID NO: 941 - RNA, 17 nt, synthetic construct
  source 1..17: mol_type = other RNA
ctcccactgatattaga

SEQ ID NO: 942 - RNA, 17 nt, synthetic construct
  source 1..17: mol_type = other RNA
ttttcctcgctaggact

SEQ ID NO: 943 - RNA, 17 nt, synthetic construct
  source 1..17: mol_type = other RNA
tgtgggctagatggctg

SEQ ID NO: 944 - RNA, 17 nt, synthetic construct
  source 1..17: mol_type = other RNA
gcccatagcctcccttt

SEQ ID NO: 945 - RNA, 17 nt, synthetic construct
  source 1..17: mol_type = other RNA
taatagctcagagcaag

SEQ ID NO: 946 - RNA, 17 nt, synthetic construct
  source 1..17: mol_type = other RNA
agtcctgggtaggcatg

SEQ ID NO: 947 - RNA, 17 nt, synthetic construct
  source 1..17: mol_type = other RNA
cagcctagagccagtga

SEQ ID NO: 948 - RNA, 17 nt, synthetic construct
  source 1..17: mol_type = other RNA
ctctcctccccaggggc

SEQ ID NO: 949 - RNA, 17 nt, synthetic construct
  source 1..17: mol_type = other RNA
gatagagaactacagta

SEQ ID NO: 950 - RNA, 17 nt, synthetic construct
  source 1..17: mol_type = other RNA
gtggcggaggtggccgt

SEQ ID NO: 951 - RNA, 17 nt, synthetic construct
  source 1..17: mol_type = other RNA
ggtcatgctgtcccttg

SEQ ID NO: 952 - RNA, 17 nt, synthetic construct
  source 1..17: mol_type = other RNA
ggttcctggtgtggggg

SEQ ID NO: 953 - RNA, 17 nt, synthetic construct
  source 1..17: mol_type = other RNA
tcagcatattagagtag

SEQ ID NO: 954 - RNA, 17 nt, synthetic construct
  source 1..17: mol_type = other RNA
tatccctagaagcagct

SEQ ID NO: 955 - RNA, 17 nt, synthetic construct
  source 1..17: mol_type = other RNA
tctatctaatatcagtg

SEQ ID NO: 956 - RNA, 17 nt, synthetic construct
  source 1..17: mol_type = other RNA
ctatactccaccttcca

SEQ ID NO: 957 - RNA, 17 nt, synthetic construct
  source 1..17: mol_type = other RNA
cccattccattctactg

SEQ ID NO: 958 - RNA, 17 nt, synthetic construct
  source 1..17: mol_type = other RNA
ctccgttgctccacagt

SEQ ID NO: 959 - RNA, 17 nt, synthetic construct
  source 1..17: mol_type = other RNA
tcccctgtcttttcctg

SEQ ID NO: 960 - RNA, 17 nt, synthetic construct
  source 1..17: mol_type = other RNA
atccctagaagcagcta

SEQ ID NO: 961 - RNA, 17 nt, synthetic construct
  source 1..17: mol_type = other RNA
caccccacttggggggc

SEQ ID NO: 962 - RNA, 17 nt, synthetic construct
  source 1..17: mol_type = other RNA
tttctcagcatattaga

SEQ ID NO: 963 - RNA, 17 nt, synthetic construct
  source 1..17: mol_type = other RNA
caggtggcttctgtgaa

SEQ ID NO: 964 - RNA, 17 nt, synthetic construct
  source 1..17: mol_type = other RNA
cccagctcactgggcct

SEQ ID NO: 965 - RNA, 17 nt, synthetic construct
  source 1..17: mol_type = other RNA
ctcagcatattagagta

SEQ ID NO: 966 - RNA, 17 nt, synthetic construct
  source 1..17: mol_type = other RNA
cattctactggaaggct

SEQ ID NO: 967 - RNA, 17 nt, synthetic construct
  source 1..17: mol_type = other RNA
tcctgtctcaccgacct

SEQ ID NO: 968 - RNA, 17 nt, synthetic construct
  source 1..17: mol_type = other RNA
gtatccatgcctaccca

SEQ ID NO: 969 - RNA, 17 nt, synthetic construct
  source 1..17: mol_type = other RNA
aggtggcttctgtgaag

SEQ ID NO: 970 - RNA, 17 nt, synthetic construct
  source 1..17: mol_type = other RNA
ggatcacaggtggaggt

SEQ ID NO: 971 - RNA, 17 nt, synthetic construct
  source 1..17: mol_type = other RNA
tttagcttgctctgagc

SEQ ID NO: 972 - RNA, 17 nt, synthetic construct
  source 1..17: mol_type = other RNA
gaagcctttggtatcca

SEQ ID NO: 973 - RNA, 17 nt, synthetic construct
  source 1..17: mol_type = other RNA
ctgtctcaccgacctca

SEQ ID NO: 974 - RNA, 17 nt, synthetic construct
  source 1..17: mol_type = other RNA
tgtgaaggagcctgtca

SEQ ID NO: 975 - RNA, 17 nt, synthetic construct
  source 1..17: mol_type = other RNA
actctgccccctcccac

SEQ ID NO: 976 - RNA, 17 nt, synthetic construct
  source 1..17: mol_type = other RNA
tctcactaatccctgcc

SEQ ID NO: 977 - RNA, 17 nt, synthetic construct
  source 1..17: mol_type = other RNA
tactggaaggctttcag

SEQ ID NO: 978 - RNA, 17 nt, synthetic construct
  source 1..17: mol_type = other RNA
tatactccaccttccac

SEQ ID NO: 979 - RNA, 17 nt, synthetic construct
  source 1..17: mol_type = other RNA
gcccagctcactgggcc

SEQ ID NO: 980 - RNA, 17 nt, synthetic construct
  source 1..17: mol_type = other RNA
ctctgagctattagaag

SEQ ID NO: 981 - RNA, 17 nt, synthetic construct
  source 1..17: mol_type = other RNA
gggggctgggtctactg

SEQ ID NO: 982 - RNA, 17 nt, synthetic construct
  source 1..17: mol_type = other RNA
ggattcatgacccagga

SEQ ID NO: 983 - RNA, 17 nt, synthetic construct
  source 1..17: mol_type = other RNA
cctgctcagttttatcc

SEQ ID NO: 984 - RNA, 17 nt, synthetic construct
  source 1..17: mol_type = other RNA
ctcaactcctctggcag

SEQ ID NO: 985 - RNA, 17 nt, synthetic construct
  source 1..17: mol_type = other RNA
ctgcctcaggctctggt

SEQ ID NO: 986 - RNA, 17 nt, synthetic construct
  source 1..17: mol_type = other RNA
tgtgcccgctgtcccat

SEQ ID NO: 987 - RNA, 17 nt, synthetic construct
  source 1..17: mol_type = other RNA
tccttctctcactaatc

SEQ ID NO: 988 - RNA, 17 nt, synthetic construct
  source 1..17: mol_type = other RNA
gcttgctctgagctatt

SEQ ID NO: 989 - RNA, 17 nt, synthetic construct
  source 1..17: mol_type = other RNA
tcaactcctctggcaga

SEQ ID NO: 990 - RNA, 17 nt, synthetic construct
  source 1..17: mol_type = other RNA
cctgtctcaccgacctc

SEQ ID NO: 991 - RNA, 17 nt, synthetic construct
  source 1..17: mol_type = other RNA
ctccacagtggcaccac

SEQ ID NO: 992 - RNA, 17 nt, synthetic construct
  source 1..17: mol_type = other RNA
tccctagaagcagctag

SEQ ID NO: 993 - RNA, 17 nt, synthetic construct
  source 1..17: mol_type = other RNA
ggactcatggtctccac

SEQ ID NO: 994 - RNA, 17 nt, synthetic construct
  source 1..17: mol_type = other RNA
agcttgctctgagctat

SEQ ID NO: 995 - RNA, 17 nt, synthetic construct
  source 1..17: mol_type = other RNA
ggtatccatgcctaccc

SEQ ID NO: 996 - RNA, 17 nt, synthetic construct
  source 1..17: mol_type = other RNA
ctggtgtggggggggct

SEQ ID NO: 997 - RNA, 17 nt, synthetic construct
  source 1..17: mol_type = other RNA
cactgggtagtggcaga

SEQ ID NO: 998 - RNA, 17 nt, synthetic construct
  source 1..17: mol_type = other RNA
tgcagagtatttctata

SEQ ID NO: 999 - RNA, 17 nt, synthetic construct
  source 1..17: mol_type = other RNA
gagtagatgtcccgttc

SEQ ID NO: 1000 - RNA, 20 nt, synthetic construct
  source 1..20: mol_type = other RNA
gacagcccagtcctacccca

SEQ ID NO: 1001 - RNA, 20 nt, synthetic construct
  source 1..20: mol_type = other RNA
ttcagggcttggggctggtg

SEQ ID NO: 1002 - RNA, 20 nt, synthetic construct
  source 1..20: mol_type = other RNA
cctttactccaaacaccccc

SEQ ID NO: 1003 - RNA, 20 nt, synthetic construct
  source 1..20: mol_type = other RNA
ccccccacccctcatcataa

SEQ ID NO: 1004 - RNA, 20 nt, synthetic construct
  source 1..20: mol_type = other RNA
ttcagtctggtgggttttct

SEQ ID NO: 1005 - RNA, 20 nt, synthetic construct
  source 1..20: mol_type = other RNA
tcacttgcccaaagctacac

SEQ ID NO: 1006 - RNA, 20 nt, synthetic construct
  source 1..20: mol_type = other RNA
gtgggttttctgctccatcc

SEQ ID NO: 1007 - RNA, 20 nt, synthetic construct
  source 1..20: mol_type = other RNA
ccggagccactgatgcctgg

SEQ ID NO: 1008 - RNA, 20 nt, synthetic construct
  source 1..20: mol_type = other RNA
gactcagtctcctagggatt

SEQ ID NO: 1009 - RNA, 20 nt, synthetic construct
  source 1..20: mol_type = other RNA
gcctatgtccaagccatttc

SEQ ID NO: 1010 - RNA, 20 nt, synthetic construct
  source 1..20: mol_type = other RNA
cctcaggccctcatctccac

SEQ ID NO: 1011 - RNA, 20 nt, synthetic construct
  source 1..20: mol_type = other RNA
tccaagccatttcccctctc

SEQ ID NO: 1012 - RNA, 20 nt, synthetic construct
  source 1..20: mol_type = other RNA
aaaggctgagatgggcccga

SEQ ID NO: 1013 - RNA, 20 nt, synthetic construct
  source 1..20: mol_type = other RNA
aaattccagtgtgaaaggct

SEQ ID NO: 1014 - RNA, 20 nt, synthetic construct
  source 1..20: mol_type = other RNA
gagatgatataaaacaggtc

SEQ ID NO: 1015 - RNA, 20 nt, synthetic construct
  source 1..20: mol_type = other RNA
gggaggggaaagaggagggg

SEQ ID NO: 1016 - RNA, 20 nt, synthetic construct
  source 1..20: mol_type = other RNA
aagaacatggaggcccggga

SEQ ID NO: 1017 - RNA, 20 nt, synthetic construct
  source 1..20: mol_type = other RNA
gggctggtggagggaggggc

SEQ ID NO: 1018 - RNA, 20 nt, synthetic construct
  source 1..20: mol_type = other RNA
atgcctggtcttctgtgcct

SEQ ID NO: 1019 - RNA, 20 nt, synthetic construct
  source 1..20: mol_type = other RNA
tgttcagggcttggggctgg

SEQ ID NO: 1020 - RNA, 20 nt, synthetic construct
  source 1..20: mol_type = other RNA
ctccaggtaatgccctctgg

SEQ ID NO: 1021 - RNA, 20 nt, synthetic construct
  source 1..20: mol_type = other RNA
agggctccccaggcccaccc

SEQ ID NO: 1022 - RNA, 20 nt, synthetic construct
  source 1..20: mol_type = other RNA
ttggctggactggacggaga

SEQ ID NO: 1023 - RNA, 20 nt, synthetic construct
  source 1..20: mol_type = other RNA
gagctaaggaagcctcggag

SEQ ID NO: 1024 - RNA, 20 nt, synthetic construct
  source 1..20: mol_type = other RNA
ccctctggggaggggaaaga

SEQ ID NO: 1025 - RNA, 20 nt, synthetic construct
  source 1..20: mol_type = other RNA
ctccaaacaccccccagccc

SEQ ID NO: 1026 - RNA, 20 nt, synthetic construct
  source 1..20: mol_type = other RNA
gggagccagtcagctaggaa

SEQ ID NO: 1027 - RNA, 20 nt, synthetic construct
  source 1..20: mol_type = other RNA
ggcccgaggcccctggccta

SEQ ID NO: 1028 - RNA, 20 nt, synthetic construct
  source 1..20: mol_type = other RNA
gaggcagctgctccaggtaa

SEQ ID NO: 1029 - RNA, 20 nt, synthetic construct
  source 1..20: mol_type = other RNA
gagggaggggcctgaaattc

SEQ ID NO: 1030 - RNA, 20 nt, synthetic construct
  source 1..20: mol_type = other RNA
gagagggccagaaatcaccc

SEQ ID NO: 1031 - RNA, 20 nt, synthetic construct
  source 1..20: mol_type = other RNA
aagaagcccctcacccctct

SEQ ID NO: 1032 - RNA, 20 nt, synthetic construct
  source 1..20: mol_type = other RNA
ccccagacagggaaactgag

SEQ ID NO: 1033 - RNA, 20 nt, synthetic construct
  source 1..20: mol_type = other RNA
gggctggaagtggctccaag

SEQ ID NO: 1034 - RNA, 20 nt, synthetic construct
  source 1..20: mol_type = other RNA
ctccaggctgtgttcagggc

SEQ ID NO: 1035 - RNA, 20 nt, synthetic construct
  source 1..20: mol_type = other RNA
gtcttctgtgcctttactcc

SEQ ID NO: 1036 - RNA, 20 nt, synthetic construct
  source 1..20: mol_type = other RNA
cacagggggtggggctggaa

SEQ ID NO: 1037 - RNA, 20 nt, synthetic construct
  source 1..20: mol_type = other RNA
gactggacggagatcagtcc

SEQ ID NO: 1038 - RNA, 20 nt, synthetic construct
  source 1..20: mol_type = other RNA
gacgggtgccccccacccct

SEQ ID NO: 1039 - RNA, 20 nt, synthetic construct
  source 1..20: mol_type = other RNA
tgtccaagccatttcccctc

SEQ ID NO: 1040 - RNA, 20 nt, synthetic construct
  source 1..20: mol_type = other RNA
agatgggcccgaggcccctg

SEQ ID NO: 1041 - RNA, 20 nt, synthetic construct
  source 1..20: mol_type = other RNA
ggtcctcagtgcctgctgcc

SEQ ID NO: 1042 - RNA, 20 nt, synthetic construct
  source 1..20: mol_type = other RNA
cagggctggcgggacagcag

SEQ ID NO: 1043 - RNA, 20 nt, synthetic construct
  source 1..20: mol_type = other RNA
ccttgatgttcagtctggtg

SEQ ID NO: 1044 - RNA, 20 nt, synthetic construct
  source 1..20: mol_type = other RNA
aggcctggagagggccagaa

SEQ ID NO: 1045 - RNA, 20 nt, synthetic construct
  source 1..20: mol_type = other RNA
ccctggagatgatataaaac

SEQ ID NO: 1046 - RNA, 20 nt, synthetic construct
  source 1..20: mol_type = other RNA
acctgaagaacatggaggcc

SEQ ID NO: 1047 - RNA, 20 nt, synthetic construct
  source 1..20: mol_type = other RNA
cctggtcttctgtgccttta

SEQ ID NO: 1048 - RNA, 20 nt, synthetic construct
  source 1..20: mol_type = other RNA
acctttgcccagcgccctgg

SEQ ID NO: 1049 - RNA, 20 nt, synthetic construct
  source 1..20: mol_type = other RNA
cccaaagctacacagggggt

SEQ ID NO: 1050 - RNA, 20 nt, synthetic construct
  source 1..20: mol_type = other RNA
gtggagggaggggcctgaaa

SEQ ID NO: 1051 - RNA, 20 nt, synthetic construct
  source 1..20: mol_type = other RNA
tgcctttactccaaacaccc

SEQ ID NO: 1052 - RNA, 20 nt, synthetic construct
  source 1..20: mol_type = other RNA
ctccatcccacccacctccc

SEQ ID NO: 1053 - RNA, 20 nt, synthetic construct
  source 1..20: mol_type = other RNA
atgttcagtctggtgggttt

SEQ ID NO: 1054 - RNA, 20 nt, synthetic construct
  source 1..20: mol_type = other RNA
ctagagctaaggaagcctcg

SEQ ID NO: 1055 - RNA, 20 nt, synthetic construct
  source 1..20: mol_type = other RNA
ggaaggaatgagggctcccc

SEQ ID NO: 1056 - RNA, 20 nt, synthetic construct
  source 1..20: mol_type = other RNA
ggctgcagggctggcgggac

SEQ ID NO: 1057 - RNA, 20 nt, synthetic construct
  source 1..20: mol_type = other RNA
atgccctctggggaggggaa

SEQ ID NO: 1058 - RNA, 20 nt, synthetic construct
  source 1..20: mol_type = other RNA
aaacaggtcagaaccctcct

SEQ ID NO: 1059 - RNA, 20 nt, synthetic construct
  source 1..20: mol_type = other RNA
gggctggaggaagccttaga

SEQ ID NO: 1060 - RNA, 20 nt, synthetic construct
  source 1..20: mol_type = other RNA
ttctcaagtctgaagaagcc

SEQ ID NO: 1061 - RNA, 20 nt, synthetic construct
  source 1..20: mol_type = other RNA
agctcatctgggctgcaggg

SEQ ID NO: 1062 - RNA, 20 nt, synthetic construct
  source 1..20: mol_type = other RNA
gggatttcccaactctcccg

SEQ ID NO: 1063 - RNA, 20 nt, synthetic construct
  source 1..20: mol_type = other RNA
gacggagatcagtccagacc

SEQ ID NO: 1064 - RNA, 20 nt, synthetic construct
  source 1..20: mol_type = other RNA
tgaaaggctgagatgggccc

SEQ ID NO: 1065 - RNA, 20 nt, synthetic construct
  source 1..20: mol_type = other RNA
cctgtctgctcagttcatcc

SEQ ID NO: 1066 - RNA, 20 nt, synthetic construct
  source 1..20: mol_type = other RNA
caggttcccccctcattctt

SEQ ID NO: 1067 - RNA, 20 nt, synthetic construct
  source 1..20: mol_type = other RNA
gtcagcaggtgacctttgcc

SEQ ID NO: 1068 - RNA, 20 nt, synthetic construct
  source 1..20: mol_type = other RNA
gaggaagccttagacagccc

SEQ ID NO: 1069 - RNA, 20 nt, synthetic construct
  source 1..20: mol_type = other RNA
ctgcatctggacaccctgcc

SEQ ID NO: 1070 - RNA, 20 nt, synthetic construct
  source 1..20: mol_type = other RNA
cccagcgccctgggtcctca

SEQ ID NO: 1071 - RNA, 20 nt, synthetic construct
  source 1..20: mol_type = other RNA
cccagcccagccagcaagcc

SEQ ID NO: 1072 - RNA, 20 nt, synthetic construct
  source 1..20: mol_type = other RNA
ggttttctgctccatcccac

SEQ ID NO: 1073 - RNA, 20 nt, synthetic construct
  source 1..20: mol_type = other RNA
taaaacaggtcagaaccctc

SEQ ID NO: 1074 - RNA, 20 nt, synthetic construct
  source 1..20: mol_type = other RNA
ctcagttcatccctagaggc

SEQ ID NO: 1075 - RNA, 20 nt, synthetic construct
  source 1..20: mol_type = other RNA
gacaccctgcctcaggccct

SEQ ID NO: 1076 - RNA, 20 nt, synthetic construct
  source 1..20: mol_type = other RNA
gcgggacagcagcgtggact

SEQ ID NO: 1077 - RNA, 20 nt, synthetic construct
  source 1..20: mol_type = other RNA
aagaggggcaagaggagctc

SEQ ID NO: 1078 - RNA, 20 nt, synthetic construct
  source 1..20: mol_type = other RNA
catctggacaccctgcctca

SEQ ID NO: 1079 - RNA, 20 nt, synthetic construct
  source 1..20: mol_type = other RNA
gaggcccgggaggggtgtca

SEQ ID NO: 1080 - RNA, 20 nt, synthetic construct
  source 1..20: mol_type = other RNA
cctgctgccctggagatgat

SEQ ID NO: 1081 - RNA, 20 nt, synthetic construct
  source 1..20: mol_type = other RNA
aggaagcctcggagctggac

SEQ ID NO: 1082 - RNA, 20 nt, synthetic construct
  source 1..20: mol_type = other RNA
tctgctcagttcatccctag

SEQ ID NO: 1083 - RNA, 20 nt, synthetic construct
  source 1..20: mol_type = other RNA
gaagtggctccaagtgcagg

SEQ ID NO: 1084 - RNA, 20 nt, synthetic construct
  source 1..20: mol_type = other RNA
gctggactggacggagatca

SEQ ID NO: 1085 - RNA, 20 nt, synthetic construct
  source 1..20: mol_type = other RNA
gagaagcacttgctagagct

SEQ ID NO: 1086 - RNA, 20 nt, synthetic construct
  source 1..20: mol_type = other RNA
ctgccctggagatgatataa

SEQ ID NO: 1087 - RNA, 20 nt, synthetic construct
  source 1..20: mol_type = other RNA
atataaaacaggtcagaacc

SEQ ID NO: 1088 - RNA, 20 nt, synthetic construct
  source 1..20: mol_type = other RNA
gctccaagtgcaggttcccc

SEQ ID NO: 1089 - RNA, 20 nt, synthetic construct
  source 1..20: mol_type = other RNA
ggctgggcagggagctcctc

SEQ ID NO: 1090 - RNA, 20 nt, synthetic construct
  source 1..20: mol_type = other RNA
gacataggccaggggcctcg

SEQ ID NO: 1091 - RNA, 20 nt, synthetic construct
  source 1..20: mol_type = other RNA
ggcctggggagccctcattc

SEQ ID NO: 1092 - RNA, 20 nt, synthetic construct
  source 1..20: mol_type = other RNA
ggctggggggtgtttggagt

SEQ ID NO: 1093 - RNA, 20 nt, synthetic construct
  source 1..20: mol_type = other RNA
ggtgggatggagcagaaaac

SEQ ID NO: 1094 - RNA, 20 nt, synthetic construct
  source 1..20: mol_type = other RNA
gcttggacataggccagggg

SEQ ID NO: 1095 - RNA, 20 nt, synthetic construct
  source 1..20: mol_type = other RNA
agggcctgaggcagggtgtc

SEQ ID NO: 1096 - RNA, 20 nt, synthetic construct
  source 1..20: mol_type = other RNA
aggcagggtgtccagatgca

SEQ ID NO: 1097 - RNA, 20 nt, synthetic construct
  source 1..20: mol_type = other RNA
tcccgccagccctgcagccc

SEQ ID NO: 1098 - RNA, 20 nt, synthetic construct
  source 1..20: mol_type = other RNA
cccctcttcatcctcctccc

SEQ ID NO: 1099 - RNA, 20 nt, synthetic construct
  source 1..20: mol_type = other RNA
aacatcaaggcacctgcggt

SEQ ID NO: 1100 - RNA, 20 nt, synthetic construct
  source 1..20: mol_type = other RNA
agctcaggaactgggggtgg

SEQ ID NO: 1101 - RNA, 20 nt, synthetic construct
  source 1..20: mol_type = other RNA
ttcttcaggttatgatgagg

SEQ ID NO: 1102 - RNA, 20 nt, synthetic construct
  source 1..20: mol_type = other RNA
gctttgggcaagtgacaccc

SEQ ID NO: 1103 - RNA, 20 nt, synthetic construct
  source 1..20: mol_type = other RNA
aggggggaacctgcacttgg

SEQ ID NO: 1104 - RNA, 20 nt, synthetic construct
  source 1..20: mol_type = other RNA
gcttgggctggggggtgttt

SEQ ID NO: 1105 - RNA, 20 nt, synthetic construct
  source 1..20: mol_type = other RNA
aactgagcagacaggcagga

SEQ ID NO: 1106 - RNA, 20 nt, synthetic construct
  source 1..20: mol_type = other RNA
tgtgtctttgggtgatttct

SEQ ID NO: 1107 - RNA, 20 nt, synthetic construct
  source 1..20: mol_type = other RNA
tgatgaggggtggggggcac

SEQ ID NO: 1108 - RNA, 20 nt, synthetic construct
  source 1..20: mol_type = other RNA
ggcagggagctcctcttgcc

SEQ ID NO: 1109 - RNA, 20 nt, synthetic construct
  source 1..20: mol_type = other RNA
aggggtggggggcacccgtc

SEQ ID NO: 1110 - RNA, 20 nt, synthetic construct
  source 1..20: mol_type = other RNA
cctggagcagctgcctctag

SEQ ID NO: 1111 - RNA, 20 nt, synthetic construct
  source 1..20: mol_type = other RNA
gggatgaactgagcagacag

SEQ ID NO: 1112 - RNA, 20 nt, synthetic construct
  source 1..20: mol_type = other RNA
aggcttcctccagccctaag

SEQ ID NO: 1113 - RNA, 20 nt, synthetic construct
  source 1..20: mol_type = other RNA
gagatgagggcctgaggcag

SEQ ID NO: 1114 - RNA, 20 nt, synthetic construct
  source 1..20: mol_type = other RNA
ggatggagcagaaaacccac

SEQ ID NO: 1115 - RNA, 20 nt, synthetic construct
  source 1..20: mol_type = other RNA
aagaatgaggggggaacctg

SEQ ID NO: 1116 - RNA, 20 nt, synthetic construct
  source 1..20: mol_type = other RNA
tttggagtaaaggcacagaa

SEQ ID NO: 1117 - RNA, 20 nt, synthetic construct
  source 1..20: mol_type = other RNA
gagtagaggggtgaggggct

SEQ ID NO: 1118 - RNA, 20 nt, synthetic construct
  source 1..20: mol_type = other RNA
acctgttttatatcatctcc

SEQ ID NO: 1119 - RNA, 20 nt, synthetic construct
  source 1..20: mol_type = other RNA
gtgagaggggaaatggcttg

SEQ ID NO: 1120 - RNA, 20 nt, synthetic construct
  source 1..20: mol_type = other RNA
tgtagctttgggcaagtgac

SEQ ID NO: 1121 - RNA, 20 nt, synthetic construct
  source 1..20: mol_type = other RNA
tgtctttgggtgatttctgg

SEQ ID NO: 1122 - RNA, 20 nt, synthetic construct
  source 1..20: mol_type = other RNA
tatcatctccagggcagcag

SEQ ID NO: 1123 - RNA, 20 nt, synthetic construct
  source 1..20: mol_type = other RNA
gagcagaaaacccaccagac

SEQ ID NO: 1124 - RNA, 20 nt, synthetic construct
  source 1..20: mol_type = other RNA
ggagactgagtccacgctgc

SEQ ID NO: 1125 - RNA, 20 nt, synthetic construct
  source 1..20: mol_type = other RNA
cagcccagatgagctcagga

SEQ ID NO: 1126 - RNA, 20 nt, synthetic construct
  source 1..20: mol_type = other RNA
ggtggcttgggctggggggt

SEQ ID NO: 1127 - RNA, 20 nt, synthetic construct
  source 1..20: mol_type = other RNA
aggggcttcttcagacttga

SEQ ID NO: 1128 - RNA, 20 nt, synthetic construct
  source 1..20: mol_type = other RNA
cacttggagccacttccagc

SEQ ID NO: 1129 - RNA, 20 nt, synthetic construct
  source 1..20: mol_type = other RNA
cagcaagcgggcgggagagt

SEQ ID NO: 1130 - RNA, 20 nt, synthetic construct
  source 1..20: mol_type = other RNA
ggcaaaggtcacctgctgac

SEQ ID NO: 1131 - RNA, 20 nt, synthetic construct
  source 1..20: mol_type = other RNA
tctttgggtgatttctggcc

SEQ ID NO: 1132 - RNA, 20 nt, synthetic construct
  source 1..20: mol_type = other RNA
tcatctccagggcagcaggc

SEQ ID NO: 1133 - RNA, 20 nt, synthetic construct
  source 1..20: mol_type = other RNA
agcagacaggcaggagggtt

SEQ ID NO: 1134 - RNA, 20 nt, synthetic construct
  source 1..20: mol_type = other RNA
aggacccagggcgctgggca

SEQ ID NO: 1135 - RNA, 20 nt, synthetic construct
  source 1..20: mol_type = other RNA
gggggtgtttggagtaaagg

SEQ ID NO: 1136 - RNA, 20 nt, synthetic construct
  source 1..20: mol_type = other RNA
gggtaggactgggctgtcta

SEQ ID NO: 1137 - RNA, 20 nt, synthetic construct
  source 1..20: mol_type = other RNA
ggtgatttctggccctctcc

SEQ ID NO: 1138 - RNA, 20 nt, synthetic construct
  source 1..20: mol_type = other RNA
gagcagctgcctctagggat

SEQ ID NO: 1139 - RNA, 20 nt, synthetic construct
  source 1..20: mol_type = other RNA
ctgtgtgtctttgggtgatt

SEQ ID NO: 1140 - RNA, 20 nt, synthetic construct
  source 1..20: mol_type = other RNA
ctgaccagtggagatgaggg

SEQ ID NO: 1141 - RNA, 20 nt, synthetic construct
  source 1..20: mol_type = other RNA
atgaggggtggggggcaccc

SEQ ID NO: 1142 - RNA, 20 nt, synthetic construct
  source 1..20: mol_type = other RNA
tctaaggcttcctccagccc

SEQ ID NO: 1143 - RNA, 20 nt, synthetic construct
  source 1..20: mol_type = other RNA
gaatttcaggcccctccctc

SEQ ID NO: 1144 - RNA, 20 nt, synthetic construct
  source 1..20: mol_type = other RNA
agcctgaagaatgagggggg

SEQ ID NO: 1145 - RNA, 20 nt, synthetic construct
  source 1..20: mol_type = other RNA
gggggcacccgtccagctcc

SEQ ID NO: 1146 - RNA, 20 nt, synthetic construct
  source 1..20: mol_type = other RNA
aaggcacagaagaccaggca

SEQ ID NO: 1147 - RNA, 20 nt, synthetic construct
  source 1..20: mol_type = other RNA
accagtggagatgagggcct

SEQ ID NO: 1148 - RNA, 20 nt, synthetic construct
  source 1..20: mol_type = other RNA
ggctgtctaaggcttcctcc

SEQ ID NO: 1149 - RNA, 20 nt, synthetic construct
  source 1..20: mol_type = other RNA
ggggtgggcctggggagccc

SEQ ID NO: 1150 - RNA, 20 nt, synthetic construct
  source 1..20: mol_type = other RNA
tagctttgggcaagtgacac

SEQ ID NO: 1151 - RNA, 20 nt, synthetic construct
  source 1..20: mol_type = other RNA
gagccacttccagccccacc

SEQ ID NO: 1152 - RNA, 20 nt, synthetic construct
  source 1..20: mol_type = other RNA
atttctggccctctccaggc

SEQ ID NO: 1153 - RNA, 20 nt, synthetic construct
  source 1..20: mol_type = other RNA
actggctccccagggagagg

SEQ ID NO: 1154 - RNA, 20 nt, synthetic construct
  source 1..20: mol_type = other RNA
gccctctccaggcctcagtt

SEQ ID NO: 1155 - RNA, 20 nt, synthetic construct
  source 1..20: mol_type = other RNA
ggactgggctgtctaaggct

SEQ ID NO: 1156 - RNA, 20 nt, synthetic construct
  source 1..20: mol_type = other RNA
ctgtcccgccagccctgcag

SEQ ID NO: 1157 - RNA, 20 nt, synthetic construct
  source 1..20: mol_type = other RNA
ggcaagtgacacccctcccg

SEQ ID NO: 1158 - RNA, 20 nt, synthetic construct
  source 1..20: mol_type = other RNA
agaacaagtgggtggcttgg

SEQ ID NO: 1159 - RNA, 20 nt, synthetic construct
  source 1..20: mol_type = other RNA
aacacagcctggagtagagg

SEQ ID NO: 1160 - RNA, 20 nt, synthetic construct
  source 1..20: mol_type = other RNA
tctggggtaggactgggctg

SEQ ID NO: 1161 - RNA, 20 nt, synthetic construct
  source 1..20: mol_type = other RNA
gaggggtgaggggcttcttc

SEQ ID NO: 1162 - RNA, 20 nt, synthetic construct
  source 1..20: mol_type = other RNA
cggtctggactgatctccgt

SEQ ID NO: 1163 - RNA, 20 nt, synthetic construct
  source 1..20: mol_type = other RNA
gctgggctgggcagggagct

SEQ ID NO: 1164 - RNA, 20 nt, synthetic construct
  source 1..20: mol_type = other RNA
gggagccctcattccttcct

SEQ ID NO: 1165 - RNA, 20 nt, synthetic construct
  source 1..20: mol_type = other RNA
gagtaaaggcacagaagacc

SEQ ID NO: 1166 - RNA, 20 nt, synthetic construct
  source 1..20: mol_type = other RNA
gcaagtgcttctccaggctt

SEQ ID NO: 1167 - RNA, 20 nt, synthetic construct
  source 1..20: mol_type = other RNA
agaggggaaatggcttggac

SEQ ID NO: 1168 - RNA, 20 nt, synthetic construct
  source 1..20: mol_type = other RNA
agtccacgctgctgtcccgc

SEQ ID NO: 1169 - RNA, 20 nt, synthetic construct
  source 1..20: mol_type = other RNA
cctctagggatgaactgagc

SEQ ID NO: 1170 - RNA, 20 nt, synthetic construct
  source 1..20: mol_type = other RNA
ggccaggggcctcgggccca

SEQ ID NO: 1171 - RNA, 20 nt, synthetic construct
  source 1..20: mol_type = other RNA
ctggctgggctgggcaggga

SEQ ID NO: 1172 - RNA, 20 nt, synthetic construct
  source 1..20: mol_type = other RNA
atctccgtccagtccagcca

SEQ ID NO: 1173 - RNA, 20 nt, synthetic construct
  source 1..20: mol_type = other RNA
gactgatctccgtccagtcc

SEQ ID NO: 1174 - RNA, 20 nt, synthetic construct
  source 1..20: mol_type = other RNA
ggaaatccctaggagactga

SEQ ID NO: 1175 - RNA, 20 nt, synthetic construct
  source 1..20: mol_type = other RNA
gctgactggctccccaggga

SEQ ID NO: 1176 - RNA, 20 nt, synthetic construct
  source 1..20: mol_type = other RNA
acacccctcccgggcctcca

SEQ ID NO: 1177 - RNA, 20 nt, synthetic construct
  source 1..20: mol_type = other RNA
gctctagcaagtgcttctcc

SEQ ID NO: 1178 - RNA, 20 nt, synthetic construct
  source 1..20: mol_type = other RNA
cttctccaggcttgctggct

SEQ ID NO: 1179 - RNA, 20 nt, synthetic construct
  source 1..20: mol_type = other RNA
ttttatatcatctccagggc

SEQ ID NO: 1180 - RNA, 20 nt, synthetic construct
  source 1..20: mol_type = other RNA
tccagatgcagcaagcgggc

SEQ ID NO: 1181 - RNA, 20 nt, synthetic construct
  source 1..20: mol_type = other RNA
gctccccagggagaggctgg

SEQ ID NO: 1182 - RNA, 20 nt, synthetic construct
  source 1..20: mol_type = other RNA
acaggctccttcacagaagc

SEQ ID NO: 1183 - RNA, 20 nt, synthetic construct
  source 1..20: mol_type = other RNA
ctctgcagaacgggacatct

SEQ ID NO: 1184 - RNA, 20 nt, synthetic construct
  source 1..20: mol_type = other RNA
gccccccccacaccaggaac

SEQ ID NO: 1185 - RNA, 20 nt, synthetic construct
  source 1..20: mol_type = other RNA
atatgctgagaaacaatagg

SEQ ID NO: 1186 - RNA, 20 nt, synthetic construct
  source 1..20: mol_type = other RNA
ggcagggattagtgagagaa

SEQ ID NO: 1187 - RNA, 20 nt, synthetic construct
  source 1..20: mol_type = other RNA
gacctcaggcctgctttaca

SEQ ID NO: 1188 - RNA, 20 nt, synthetic construct
  source 1..20: mol_type = other RNA
cagaacgggacatctactct

SEQ ID NO: 1189 - RNA, 20 nt, synthetic construct
  source 1..20: mol_type = other RNA
gagtagctagctgcttctag

SEQ ID NO: 1190 - RNA, 20 nt, synthetic construct
  source 1..20: mol_type = other RNA
gtgccactgtggagcaacgg

SEQ ID NO: 1191 - RNA, 20 nt, synthetic construct
  source 1..20: mol_type = other RNA
gggaatctgtggtgccactg

SEQ ID NO: 1192 - RNA, 20 nt, synthetic construct
  source 1..20: mol_type = other RNA
gtgagagcttctccctccag

SEQ ID NO: 1193 - RNA, 20 nt, synthetic construct
  source 1..20: mol_type = other RNA
gctccaggatgggacagcgg

SEQ ID NO: 1194 - RNA, 20 nt, synthetic construct
  source 1..20: mol_type = other RNA
ctgagaaacaataggtttct

SEQ ID NO: 1195 - RNA, 20 nt, synthetic construct
  source 1..20: mol_type = other RNA
acctgttttatattggctcc

SEQ ID NO: 1196 - RNA, 20 nt, synthetic construct
  source 1..20: mol_type = other RNA
agattgcccatgcttttcac

SEQ ID NO: 1197 - RNA, 20 nt, synthetic construct
  source 1..20: mol_type = other RNA
gggtggaaggtggagtatag

SEQ ID NO: 1198 - RNA, 20 nt, synthetic construct
  source 1..20: mol_type = other RNA
ccaaaggcttctaatagctc

SEQ ID NO: 1199 - RNA, 20 nt, synthetic construct
  source 1..20: mol_type = other RNA
agacaggaaaagacagggga

SEQ ID NO: 1200 - RNA, 20 nt, synthetic construct
  source 1..20: mol_type = other RNA
gacccagccccccaagtggg

SEQ ID NO: 1201 - RNA, 20 nt, synthetic construct
  source 1..20: mol_type = other RNA
ccgtagctgggcagggatta

SEQ ID NO: 1202 - RNA, 20 nt, synthetic construct
  source 1..20: mol_type = other RNA
cagtagacccagccccccaa

SEQ ID NO: 1203 - RNA, 20 nt, synthetic construct
  source 1..20: mol_type = other RNA
ggtggtgagagcttctccct

SEQ ID NO: 1204 - RNA, 20 nt, synthetic construct
  source 1..20: mol_type = other RNA
gaatggaatggggaatctgt

SEQ ID NO: 1205 - RNA, 20 nt, synthetic construct
  source 1..20: mol_type = other RNA
gatggctgggtggtgagagc

SEQ ID NO: 1206 - RNA, 20 nt, synthetic construct
  source 1..20: mol_type = other RNA
tggagcaacggaggaagtgg

SEQ ID NO: 1207 - RNA, 20 nt, synthetic construct
  source 1..20: mol_type = other RNA
gcctccctttccccagcttc

SEQ ID NO: 1208 - RNA, 20 nt, synthetic construct
  source 1..20: mol_type = other RNA
ggtcatgaatcccaagcctt

SEQ ID NO: 1209 - RNA, 20 nt, synthetic construct
  source 1..20: mol_type = other RNA
gctagctgcttctagggata

SEQ ID NO: 1210 - RNA, 20 nt, synthetic construct
  source 1..20: mol_type = other RNA
gcccatagcctccctttccc

SEQ ID NO: 1211 - RNA, 20 nt, synthetic construct
  source 1..20: mol_type = other RNA
gagaccatgagtcccaagcc

SEQ ID NO: 1212 - RNA, 20 nt, synthetic construct
  source 1..20: mol_type = other RNA
tgacctgttttatattggct

SEQ ID NO: 1213 - RNA, 20 nt, synthetic construct
  source 1..20: mol_type = other RNA
ctctaatatgctgagaaaca

SEQ ID NO: 1214 - RNA, 20 nt, synthetic construct
  source 1..20: mol_type = other RNA
ccactgtggagcaacggagg

SEQ ID NO: 1215 - RNA, 20 nt, synthetic construct
  source 1..20: mol_type = other RNA
acctccacctgtgatcccaa

SEQ ID NO: 1216 - RNA, 20 nt, synthetic construct
  source 1..20: mol_type = other RNA
ctttacagcctagagccagt

SEQ ID NO: 1217 - RNA, 20 nt, synthetic construct
  source 1..20: mol_type = other RNA
ctgagcagtccagaccagag

SEQ ID NO: 1218 - RNA, 20 nt, synthetic construct
  source 1..20: mol_type = other RNA
aggcaggaaggccatgcagc

SEQ ID NO: 1219 - RNA, 20 nt, synthetic construct
  source 1..20: mol_type = other RNA
ttggctccaggatgggacag

SEQ ID NO: 1220 - RNA, 20 nt, synthetic construct
  source 1..20: mol_type = other RNA
aaagccttccagtagaatgg

SEQ ID NO: 1221 - RNA, 20 nt, synthetic construct
  source 1..20: mol_type = other RNA
atattagatagagaactaca

SEQ ID NO: 1222 - RNA, 20 nt, synthetic construct
  source 1..20: mol_type = other RNA
cccagtgcaaggcttttggc

SEQ ID NO: 1223 - RNA, 20 nt, synthetic construct
  source 1..20: mol_type = other RNA
tagaaatactctgcagaacg

SEQ ID NO: 1224 - RNA, 20 nt, synthetic construct
  source 1..20: mol_type = other RNA
aatcccaagcctttctccca

SEQ ID NO: 1225 - RNA, 20 nt, synthetic construct
  source 1..20: mol_type = other RNA
gataccaaaggcttctaata

SEQ ID NO: 1226 - RNA, 20 nt, synthetic construct
  source 1..20: mol_type = other RNA
aaactgagcaggcaagcggg

SEQ ID NO: 1227 - RNA, 20 nt, synthetic construct
  source 1..20: mol_type = other RNA
cttttcacggccacctccgc

SEQ ID NO: 1228 - RNA, 20 nt, synthetic construct
  source 1..20: mol_type = other RNA
agaaatccctctgagattgc

SEQ ID NO: 1229 - RNA, 20 nt, synthetic construct
  source 1..20: mol_type = other RNA
gagtatagaaatactctgca

SEQ ID NO: 1230 - RNA, 20 nt, synthetic construct
  source 1..20: mol_type = other RNA
aaggttacatgcccccacac

SEQ ID NO: 1231 - RNA, 20 nt, synthetic construct
  source 1..20: mol_type = other RNA
tttcttcccttccttcctct

SEQ ID NO: 1232 - RNA, 20 nt, synthetic construct
  source 1..20: mol_type = other RNA
ttttatattggctccaggat

SEQ ID NO: 1233 - RNA, 20 nt, synthetic construct
  source 1..20: mol_type = other RNA
gagccagtgacaggctcctt

SEQ ID NO: 1234 - RNA, 20 nt, synthetic construct
  source 1..20: mol_type = other RNA
gaaggtggagtatagaaata

SEQ ID NO: 1235 - RNA, 20 nt, synthetic construct
  source 1..20: mol_type = other RNA
ccactacccagtgcaaggct

SEQ ID NO: 1236 - RNA, 20 nt, synthetic construct
  source 1..20: mol_type = other RNA
ggtttcttttcctcgctagg

SEQ ID NO: 1237 - RNA, 20 nt, synthetic construct
  source 1..20: mol_type = other RNA
aggtcggtgagacaggaaaa

SEQ ID NO: 1238 - RNA, 20 nt, synthetic construct
  source 1..20: mol_type = other RNA
gagaactacagtagacccag

SEQ ID NO: 1239 - RNA, 20 nt, synthetic construct
  source 1..20: mol_type = other RNA
agctgggcaaaggtcacctg

SEQ ID NO: 1240 - RNA, 20 nt, synthetic construct
  source 1..20: mol_type = other RNA
ttagatagagaactacagta

SEQ ID NO: 1241 - RNA, 20 nt, synthetic construct
  source 1..20: mol_type = other RNA
caggcagctctgccactacc

SEQ ID NO: 1242 - RNA, 20 nt, synthetic construct
  source 1..20: mol_type = other RNA
caaggcttttggcccatagc

SEQ ID NO: 1243 - RNA, 20 nt, synthetic construct
  source 1..20: mol_type = other RNA
agagcttctccctccagctc

SEQ ID NO: 1244 - RNA, 20 nt, synthetic construct
  source 1..20: mol_type = other RNA
ggtaggcatggataccaaag

SEQ ID NO: 1245 - RNA, 20 nt, synthetic construct
  source 1..20: mol_type = other RNA
agaaacaataggtttctttt

SEQ ID NO: 1246 - RNA, 20 nt, synthetic construct
  source 1..20: mol_type = other RNA
gggtgggagggggcagagtg

SEQ ID NO: 1247 - RNA, 20 nt, synthetic construct
  source 1..20: mol_type = other RNA
tgctgagaaacaataggttt

SEQ ID NO: 1248 - RNA, 20 nt, synthetic construct
  source 1..20: mol_type = other RNA
gctgggcagggattagtgag

SEQ ID NO: 1249 - RNA, 20 nt, synthetic construct
  source 1..20: mol_type = other RNA
aacaagggacagcatgaccc

SEQ ID NO: 1250 - RNA, 20 nt, synthetic construct
  source 1..20: mol_type = other RNA
gagcaacggaggaagtgggg

SEQ ID NO: 1251 - RNA, 20 nt, synthetic construct
  source 1..20: mol_type = other RNA
ccggctcacctagatgaggt

SEQ ID NO: 1252 - RNA, 20 nt, synthetic construct
  source 1..20: mol_type = other RNA
ggactcagttttttcagtcc

SEQ ID NO: 1253 - RNA, 20 nt, synthetic construct
  source 1..20: mol_type = other RNA
gaaatactctgcagaacggg

SEQ ID NO: 1254 - RNA, 20 nt, synthetic construct
  source 1..20: mol_type = other RNA
ggctagatggctgggtggtg

SEQ ID NO: 1255 - RNA, 20 nt, synthetic construct
  source 1..20: mol_type = other RNA
ggagggggcagagtgaaggt

SEQ ID NO: 1256 - RNA, 20 nt, synthetic construct
  source 1..20: mol_type = other RNA
gctgcttctagggataaaac

SEQ ID NO: 1257 - RNA, 20 nt, synthetic construct
  source 1..20: mol_type = other RNA
cctggagtagctagctgctt

SEQ ID NO: 1258 - RNA, 20 nt, synthetic construct
  source 1..20: mol_type = other RNA
ccagaggagttgagaaatcc

SEQ ID NO: 1259 - RNA, 20 nt, synthetic construct
  source 1..20: mol_type = other RNA
cagccatctgccagaggagt

SEQ ID NO: 1260 - RNA, 20 nt, synthetic construct
  source 1..20: mol_type = other RNA
cccccacactgacctccacc

SEQ ID NO: 1261 - RNA, 20 nt, synthetic construct
  source 1..20: mol_type = other RNA
gatagagaactacagtagac

SEQ ID NO: 1262 - RNA, 20 nt, synthetic construct
  source 1..20: mol_type = other RNA
catgcccccacactgacctc

SEQ ID NO: 1263 - RNA, 20 nt, synthetic construct
  source 1..20: mol_type = other RNA
tgatcccaacagtctcctct

SEQ ID NO: 1264 - RNA, 20 nt, synthetic construct
  source 1..20: mol_type = other RNA
atcccaacagtctcctctgc

SEQ ID NO: 1265 - RNA, 20 nt, synthetic construct
  source 1..20: mol_type = other RNA
gaatggggaatctgtggtgc

SEQ ID NO: 1266 - RNA, 20 nt, synthetic construct
  source 1..20: mol_type = other RNA
gctgggtggtgagagcttct

SEQ ID NO: 1267 - RNA, 20 nt, synthetic construct
  source 1..20: mol_type = other RNA
acccaattgcaggcagctct

SEQ ID NO: 1268 - RNA, 20 nt, synthetic construct
  source 1..20: mol_type = other RNA
ggacagcgggcacagaaggc

SEQ ID NO: 1269 - RNA, 20 nt, synthetic construct
  source 1..20: mol_type = other RNA
gatgaggtcggtgagacagg

SEQ ID NO: 1270 - RNA, 20 nt, synthetic construct
  source 1..20: mol_type = other RNA
tggtgccactgtggagcaac

SEQ ID NO: 1271 - RNA, 20 nt, synthetic construct
  source 1..20: mol_type = other RNA
ggcatggataccaaaggctt

SEQ ID NO: 1272 - RNA, 20 nt, synthetic construct
  source 1..20: mol_type = other RNA
agcaggcaagcggggagggc

SEQ ID NO: 1273 - RNA, 20 nt, synthetic construct
  source 1..20: mol_type = other RNA
agtcccaagccttctgtggg

SEQ ID NO: 1274 - RNA, 20 nt, synthetic construct
  source 1..20: mol_type = other RNA
atagctcagagcaagctaaa

SEQ ID NO: 1275 - RNA, 20 nt, synthetic construct
  source 1..20: mol_type = other RNA
gggataaaactgagcaggca

SEQ ID NO: 1276 - RNA, 20 nt, synthetic construct
  source 1..20: mol_type = other RNA
agcagtccagaccagagcct

SEQ ID NO: 1277 - RNA, 20 nt, synthetic construct
  source 1..20: mol_type = other RNA
tgggctagatggctgggtgg

SEQ ID NO: 1278 - RNA, 20 nt, synthetic construct
  source 1..20: mol_type = other RNA
gctcagagcaagctaaacaa

SEQ ID NO: 1279 - RNA, 20 nt, synthetic construct
  source 1..20: mol_type = other RNA
cttctagggataaaactgag

SEQ ID NO: 1280 - RNA, 20 nt, synthetic construct
  source 1..20: mol_type = other RNA
cccatgcttttcacggccac

SEQ ID NO: 1281 - RNA, 20 nt, synthetic construct
  source 1..20: mol_type = other RNA
tattggctccaggatgggac

SEQ ID NO: 1282 - RNA, 20 nt, synthetic construct
  source 1..20: mol_type = other RNA
ggcaaaggtcacctgctgag

SEQ ID NO: 1283 - RNA, 20 nt, synthetic construct
  source 1..20: mol_type = other RNA
cagcctagagccagtgacag

SEQ ID NO: 1284 - RNA, 20 nt, synthetic construct
  source 1..20: mol_type = other RNA
aaaagcatgggcaatctcag

SEQ ID NO: 1285 - RNA, 20 nt, synthetic construct
  source 1..20: mol_type = other RNA
ctccaggtaatgcccctggg

SEQ ID NO: 1286 - RNA, 20 nt, synthetic construct
  source 1..20: mol_type = other RNA
gctactccaggtaatgcccc

SEQ ID NO: 1287 - RNA, 20 nt, synthetic construct
  source 1..20: mol_type = other RNA
tcccctgtcttttcctgtct

SEQ ID NO: 1288 - RNA, 20 nt, synthetic construct
  source 1..20: mol_type = other RNA
tgcccgctgtcccatcctgg

SEQ ID NO: 1289 - RNA, 20 nt, synthetic construct
  source 1..20: mol_type = other RNA
ctcagttttatccctagaag

SEQ ID NO: 1290 - RNA, 20 nt, synthetic construct
  source 1..20: mol_type = other RNA
cagagtatttctatactcca

SEQ ID NO: 1291 - RNA, 20 nt, synthetic construct
  source 1..20: mol_type = other RNA
ctgtcccttgtttagcttgc

SEQ ID NO: 1292 - RNA, 20 nt, synthetic construct
  source 1..20: mol_type = other RNA
ggtgagccggtagctgatcc

SEQ ID NO: 1293 - RNA, 20 nt, synthetic construct
  source 1..20: mol_type = other RNA
ctggaaggctttcaggtggc

SEQ ID NO: 1294 - RNA, 20 nt, synthetic construct
  source 1..20: mol_type = other RNA
ggccaaaagccttgcactgg

SEQ ID NO: 1295 - RNA, 20 nt, synthetic construct
  source 1..20: mol_type = other RNA
cccctggggaggagaggaag

SEQ ID NO: 1296 - RNA, 20 nt, synthetic construct
  source 1..20: mol_type = other RNA
ctgtagttctctatctaata

SEQ ID NO: 1297 - RNA, 20 nt, synthetic construct
  source 1..20: mol_type = other RNA
ggtctactgtagttctctat

SEQ ID NO: 1298 - RNA, 20 nt, synthetic construct
  source 1..20: mol_type = other RNA
tctaatatcagtgggagaaa

SEQ ID NO: 1299 - RNA, 20 nt, synthetic construct
  source 1..20: mol_type = other RNA
atcccttggtggcggaggtg

SEQ ID NO: 1300 - RNA, 20 nt, synthetic construct
  source 1..20: mol_type = other RNA
gatgtcccgttctgcagagt

SEQ ID NO: 1301 - RNA, 20 nt, synthetic construct
  source 1..20: mol_type = other RNA
cctgctcagttttatcccta

SEQ ID NO: 1302 - RNA, 20 nt, synthetic construct
  source 1..20: mol_type = other RNA
aaacaggtcacagccctccc

SEQ ID NO: 1303 - RNA, 20 nt, synthetic construct
  source 1..20: mol_type = other RNA
tcactggctctaggctgtaa

SEQ ID NO: 1304 - RNA, 20 nt, synthetic construct
  source 1..20: mol_type = other RNA
ctctgagctattagaagcct

SEQ ID NO: 1305 - RNA, 20 nt, synthetic construct
  source 1..20: mol_type = other RNA
atccctgcccagctacggca

SEQ ID NO: 1306 - RNA, 20 nt, synthetic construct
  source 1..20: mol_type = other RNA
gcttctgtgaaggagcctgt

SEQ ID NO: 1307 - RNA, 20 nt, synthetic construct
  source 1..20: mol_type = other RNA
tagttctctatctaatatca

SEQ ID NO: 1308 - RNA, 20 nt, synthetic construct
  source 1..20: mol_type = other RNA
cggcagaggagactgttggg

SEQ ID NO: 1309 - RNA, 20 nt, synthetic construct
  source 1..20: mol_type = other RNA
aaggagcctgtcactggctc

SEQ ID NO: 1310 - RNA, 20 nt, synthetic construct
  source 1..20: mol_type = other RNA
gcccacagaaggcttgggac

SEQ ID NO: 1311 - RNA, 20 nt, synthetic construct
  source 1..20: mol_type = other RNA
tccctagaagcagctagcta

SEQ ID NO: 1312 - RNA, 20 nt, synthetic construct
  source 1..20: mol_type = other RNA
cctacccaggactgaaaaaa

SEQ ID NO: 1313 - RNA, 20 nt, synthetic construct
  source 1..20: mol_type = other RNA
ttgtttctcagcatattaga

SEQ ID NO: 1314 - RNA, 20 nt, synthetic construct
  source 1..20: mol_type = other RNA
ttgggatcacaggtggaggt

SEQ ID NO: 1315 - RNA, 20 nt, synthetic construct
  source 1..20: mol_type = other RNA
gcagatggctgcatggcctt

SEQ ID NO: 1316 - RNA, 20 nt, synthetic construct
  source 1..20: mol_type = other RNA
cctcaggctctggtctggac

SEQ ID NO: 1317 - RNA, 20 nt, synthetic construct
  source 1..20: mol_type = other RNA
acctttgcccagctcactgg

SEQ ID NO: 1318 - RNA, 20 nt, synthetic construct
  source 1..20: mol_type = other RNA
gtatccatgcctacccagga

SEQ ID NO: 1319 - RNA, 20 nt, synthetic construct
  source 1..20: mol_type = other RNA
gaagcctttggtatccatgc

SEQ ID NO: 1320 - RNA, 20 nt, synthetic construct
  source 1..20: mol_type = other RNA
ggggcatgtaaccttcactc

SEQ ID NO: 1321 - RNA, 20 nt, synthetic construct
  source 1..20: mol_type = other RNA
gggaaagggaggctatgggc

SEQ ID NO: 1322 - RNA, 20 nt, synthetic construct
  source 1..20: mol_type = other RNA
tgaaggagcctgtcactggc

SEQ ID NO: 1323 - RNA, 20 nt, synthetic construct
  source 1..20: mol_type = other RNA
gggggggctagaagctgggg

SEQ ID NO: 1324 - RNA, 20 nt, synthetic construct
  source 1..20: mol_type = other RNA
ggtagtggcagagctgcctg

SEQ ID NO: 1325 - RNA, 20 nt, synthetic construct
  source 1..20: mol_type = other RNA
tcccatcctggagccaatat

SEQ ID NO: 1326 - RNA, 20 nt, synthetic construct
  source 1..20: mol_type = other RNA
gaagctggggaaagggaggc

SEQ ID NO: 1327 - RNA, 20 nt, synthetic construct
  source 1..20: mol_type = other RNA
gctgatcccttggtggcgga

SEQ ID NO: 1328 - RNA, 20 nt, synthetic construct
  source 1..20: mol_type = other RNA
gcgaggaaaagaaacctatt

SEQ ID NO: 1329 - RNA, 20 nt, synthetic construct
  source 1..20: mol_type = other RNA
gactgctcagcaggtgacct

SEQ ID NO: 1330 - RNA, 20 nt, synthetic construct
  source 1..20: mol_type = other RNA
gaaggctttcaggtggcttc

SEQ ID NO: 1331 - RNA, 20 nt, synthetic construct
  source 1..20: mol_type = other RNA
aggtccaaggcttgtcccct

SEQ ID NO: 1332 - RNA, 20 nt, synthetic construct
  source 1..20: mol_type = other RNA
tggggggggctagaagctgg

SEQ ID NO: 1333 - RNA, 20 nt, synthetic construct
  source 1..20: mol_type = other RNA
tttctcagcatattagagta

SEQ ID NO: 1334 - RNA, 20 nt, synthetic construct
  source 1..20: mol_type = other RNA
ggcaatctcagagggatttc

SEQ ID NO: 1335 - RNA, 20 nt, synthetic construct
  source 1..20: mol_type = other RNA
aagcaggcctgaggtccaag

SEQ ID NO: 1336 - RNA, 20 nt, synthetic construct
  source 1..20: mol_type = other RNA
tctcaccgacctcatctagg

SEQ ID NO: 1337 - RNA, 20 nt, synthetic construct
  source 1..20: mol_type = other RNA
tcccgttctgcagagtattt

SEQ ID NO: 1338 - RNA, 20 nt, synthetic construct
  source 1..20: mol_type = other RNA
tcagtgggagaaaggcttgg

SEQ ID NO: 1339 - RNA, 20 nt, synthetic construct
  source 1..20: mol_type = other RNA
gaagcagctagctactccag

SEQ ID NO: 1340 - RNA, 20 nt, synthetic construct
  source 1..20: mol_type = other RNA
atatcagtgggagaaaggct

SEQ ID NO: 1341 - RNA, 20 nt, synthetic construct
  source 1..20: mol_type = other RNA
atgcccctggggaggagagg

SEQ ID NO: 1342 - RNA, 20 nt, synthetic construct
  source 1..20: mol_type = other RNA
tcccttgtttagcttgctct

SEQ ID NO: 1343 - RNA, 20 nt, synthetic construct
  source 1..20: mol_type = other RNA
cccgctgtcccatcctggag

SEQ ID NO: 1344 - RNA, 20 nt, synthetic construct
  source 1..20: mol_type = other RNA
gagccaatataaaacaggtc

SEQ ID NO: 1345 - RNA, 20 nt, synthetic construct
  source 1..20: mol_type = other RNA
gccttcctgcctcaggctct

SEQ ID NO: 1346 - RNA, 20 nt, synthetic construct
  source 1..20: mol_type = other RNA
ggctgtaaagcaggcctgag

SEQ ID NO: 1347 - RNA, 20 nt, synthetic construct
  source 1..20: mol_type = other RNA
taaagcaggcctgaggtcca

SEQ ID NO: 1348 - RNA, 20 nt, synthetic construct
  source 1..20: mol_type = other RNA
gcggaggtggccgtgaaaag

SEQ ID NO: 1349 - RNA, 20 nt, synthetic construct
  source 1..20: mol_type = other RNA
agccggtagctgatcccttg

SEQ ID NO: 1350 - RNA, 20 nt, synthetic construct
  source 1..20: mol_type = other RNA
gtggcggaggtggccgtgaa

SEQ ID NO: 1351 - RNA, 20 nt, synthetic construct
  source 1..20: mol_type = other RNA
tactccaccttccaccccac

SEQ ID NO: 1352 - RNA, 20 nt, synthetic construct
  source 1..20: mol_type = other RNA
gttctctatctaatatcagt

SEQ ID NO: 1353 - RNA, 20 nt, synthetic construct
  source 1..20: mol_type = other RNA
cccagctcactgggccttct

SEQ ID NO: 1354 - RNA, 20 nt, synthetic construct
  source 1..20: mol_type = other RNA
tgggccaaaagccttgcact

SEQ ID NO: 1355 - RNA, 20 nt, synthetic construct
  source 1..20: mol_type = other RNA
ctccaccttccaccccactt

SEQ ID NO: 1356 - RNA, 20 nt, synthetic construct
  source 1..20: mol_type = other RNA
gaggtcagtgtgggggcatg

SEQ ID NO: 1357 - RNA, 20 nt, synthetic construct
  source 1..20: mol_type = other RNA
cactgggtagtggcagagct

SEQ ID NO: 1358 - RNA, 20 nt, synthetic construct
  source 1..20: mol_type = other RNA
cccaggactgaaaaaactga

SEQ ID NO: 1359 - RNA, 20 nt, synthetic construct
  source 1..20: mol_type = other RNA
cctgcaattgggtcatgctg

SEQ ID NO: 1360 - RNA, 20 nt, synthetic construct
  source 1..20: mol_type = other RNA
ccccctcccaccccacttcc

SEQ ID NO: 1361 - RNA, 20 nt, synthetic construct
  source 1..20: mol_type = other RNA
ggagaaaggcttgggattca

SEQ ID NO: 1362 - RNA, 20 nt, synthetic construct
  source 1..20: mol_type = other RNA
taaccttcactctgccccct

SEQ ID NO: 1363 - RNA, 20 nt, synthetic construct
  source 1..20: mol_type = other RNA
catggccttcctgcctcagg

SEQ ID NO: 1364 - RNA, 20 nt, synthetic construct
  source 1..20: mol_type = other RNA
tccatgcctacccaggactg

SEQ ID NO: 1365 - RNA, 20 nt, synthetic construct
  source 1..20: mol_type = other RNA
ctccacagtggcaccacaga

SEQ ID NO: 1366 - RNA, 20 nt, synthetic construct
  source 1..20: mol_type = other RNA
ggccttctgtgcccgctgtc

SEQ ID NO: 1367 - RNA, 20 nt, synthetic construct
  source 1..20: mol_type = other RNA
gtctggactgctcagcaggt

SEQ ID NO: 1368 - RNA, 20 nt, synthetic construct
  source 1..20: mol_type = other RNA
ctcagcaggtgacctttgcc

SEQ ID NO: 1369 - RNA, 20 nt, synthetic construct
  source 1..20: mol_type = other RNA
gcttgctctgagctattaga

SEQ ID NO: 1370 - RNA, 20 nt, synthetic construct
  source 1..20: mol_type = other RNA
tccttctctcactaatccct

SEQ ID NO: 1371 - RNA, 20 nt, synthetic construct
  source 1..20: mol_type = other RNA
ttagagtagatgtcccgttc

SEQ ID NO: 1372 - RNA, 20 nt, synthetic construct
  source 1..20: mol_type = other RNA
taaaacaggtcacagccctc

SEQ ID NO: 1373 - RNA, 20 nt, synthetic construct
  source 1..20: mol_type = other RNA
agtcctagcgaggaaaagaa

SEQ ID NO: 1374 - RNA, 20 nt, synthetic construct
  source 1..20: mol_type = other RNA
gagggagaagctctcaccac

SEQ ID NO: 1375 - RNA, 20 nt, synthetic construct
  source 1..20: mol_type = other RNA
gtctccacccttgggttcct

SEQ ID NO: 1376 - RNA, 20 nt, synthetic construct
  source 1..20: mol_type = other RNA
cccagctacggcagaggaga

SEQ ID NO: 1377 - RNA, 20 nt, synthetic construct
  source 1..20: mol_type = other RNA
tttagcttgctctgagctat

SEQ ID NO: 1378 - RNA, 20 nt, synthetic construct
  source 1..20: mol_type = other RNA
ggactcatggtctccaccct

SEQ ID NO: 1379 - RNA, 20 nt, synthetic construct
  source 1..20: mol_type = other RNA
ggtcatgctgtcccttgttt

SEQ ID NO: 1380 - RNA, 20 nt, synthetic construct
  source 1..20: mol_type = other RNA
gccgtgaaaagcatgggcaa

SEQ ID NO: 1381 - RNA, 20 nt, synthetic construct
  source 1..20: mol_type = other RNA
ttagaagcctttggtatcca

SEQ ID NO: 1382 - RNA, 20 nt, synthetic construct
  source 1..20: mol_type = other RNA
ggatcacaggtggaggtcag

SEQ ID NO: 1383 - RNA, 20 nt, synthetic construct
  source 1..20: mol_type = other RNA
caattgggtcatgctgtccc

SEQ ID NO: 1384 - RNA, 20 nt, synthetic construct
  source 1..20: mol_type = other RNA
gctctaggctgtaaagcagg

SEQ ID NO: 1385 - RNA, 20 nt, synthetic construct
  source 1..20: mol_type = other RNA
ggttcctggtgtgggggggg

SEQ ID NO: 1386 - RNA, 20 nt, synthetic construct
  source 1..20: mol_type = other RNA
gtggcagagctgcctgcaat

SEQ ID NO: 1387 - RNA, 20 nt, synthetic construct
  source 1..20: mol_type = other RNA
gcaccacagattccccattc

SEQ ID NO: 1388 - RNA, 20 nt, synthetic construct
  source 1..20: mol_type = other RNA
tttctatactccaccttcca

SEQ ID NO: 1389 - RNA, 20 nt, synthetic construct
  source 1..20: mol_type = other RNA
gtgtggggggggctagaagc

SEQ ID NO: 1390 - RNA, 20 nt, synthetic construct
  source 1..20: mol_type = other RNA
accttcactctgccccctcc

SEQ ID NO: 1391 - RNA, 20 nt, synthetic construct
  source 1..20: mol_type = other RNA
gctgcatggccttcctgcct

SEQ ID NO: 1392 - RNA, 20 nt, synthetic construct
  source 1..20: mol_type = other RNA
tgggggcatgtaaccttcac

SEQ ID NO: 1393 - RNA, 20 nt, synthetic construct
  source 1..20: mol_type = other RNA
gggggctgggtctactgtag

SEQ ID NO: 1394 - RNA, 20 nt, synthetic construct
  source 1..20: mol_type = other RNA
gcagagctgcctgcaattgg

SEQ ID NO: 1395 - RNA, 20 nt, synthetic construct
  source 1..20: mol_type = other RNA
aaaaaactgagtcctagcga

SEQ ID NO: 1396 - RNA, 20 nt, synthetic construct
  source 1..20: mol_type = other RNA
agctattagaagcctttggt

SEQ ID NO: 1397 - RNA, 20 nt, synthetic construct
  source 1..20: mol_type = other RNA
gggaggagaggaaggaaggg

SEQ ID NO: 1398 - RNA, 20 nt, synthetic construct
  source 1..20: mol_type = other RNA
tcttttcctgtctcaccgac

SEQ ID NO: 1399 - RNA, 20 nt, synthetic construct
  source 1..20: mol_type = other RNA
gagtagatgtcccgttctgc

SEQ ID NO: 1400 - RNA, 41 nt, synthetic construct
  source 1..41: mol_type = other RNA
atagattgctccttacgaggagaccccaactctcccgcccg

SEQ ID NO: 1401 - RNA, 41 nt, synthetic construct
  source 1..41: mol_type = other RNA
atagattgctccttacgaggagacaggcttagggctggagg

SEQ ID NO: 1402 - RNA, 41 nt, synthetic construct
  source 1..41: mol_type = other RNA
atagattgctccttacgaggagacccctctcaccagcctct

SEQ ID NO: 1403 - RNA, 41 nt, synthetic construct
  source 1..41: mol_type = other RNA
atagattgctccttacgaggagacagggcttggggctggtg

SEQ ID NO: 1404 - RNA, 41 nt, synthetic construct
  source 1..41: mol_type = other RNA
atagattgctccttacgaggagacctccaaacaccccccag

SEQ ID NO: 1405 - RNA, 41 nt, synthetic construct
  source 1..41: mol_type = other RNA
atagattgctccttacgaggagacgggctggaggaagcctt

SEQ ID NO: 1406 - RNA, 41 nt, synthetic construct
  source 1..41: mol_type = other RNA
atagattgctccttacgaggagacccaactctcccgcccgc

SEQ ID NO: 1407 - RNA, 41 nt, synthetic construct
  source 1..41: mol_type = other RNA
atagattgctccttacgaggagacgctggactggacggaga

SEQ ID NO: 1408 - RNA, 41 nt, synthetic construct
  source 1..41: mol_type = other RNA
atagattgctccttacgaggagactctgctccatcccaccc

SEQ ID NO: 1409 - RNA, 41 nt, synthetic construct
  source 1..41: mol_type = other RNA
atagattgctccttacgaggagaccccagcgccctgggtcc

SEQ ID NO: 1410 - RNA, 41 nt, synthetic construct
  source 1..41: mol_type = other RNA
atagattgctccttacgaggagactgtgcctttactccaaa

SEQ ID NO: 1411 - RNA, 41 nt, synthetic construct
  source 1..41: mol_type = other RNA
atagattgctccttacgaggagacctgcatctggacaccct

SEQ ID NO: 1412 - RNA, 41 nt, synthetic construct
  source 1..41: mol_type = other RNA
atagattgctccttacgaggagacctagagctaaggaagcc

SEQ ID NO: 1413 - RNA, 41 nt, synthetic construct
  source 1..41: mol_type = other RNA
atagattgctccttacgaggagacgcccagcgccctgggtc

SEQ ID NO: 1414 - RNA, 41 nt, synthetic construct
  source 1..41: mol_type = other RNA
atagattgctccttacgaggagaccagtgtgaaaggctgag

SEQ ID NO: 1415 - RNA, 41 nt, synthetic construct
  source 1..41: mol_type = other RNA
atagattgctccttacgaggagacttcaggcttagggctgg

SEQ ID NO: 1416 - RNA, 41 nt, synthetic construct
  source 1..41: mol_type = other RNA
atagattgctccttacgaggagacgggcctcgatccctcgc

SEQ ID NO: 1417 - RNA, 41 nt, synthetic construct
  source 1..41: mol_type = other RNA
atagattgctccttacgaggagacactccaaacacccccca

SEQ ID NO: 1418 - RNA, 41 nt, synthetic construct
  source 1..41: mol_type = other RNA
atagattgctccttacgaggagacagtctggtgggttttct

SEQ ID NO: 1419 - RNA, 41 nt, synthetic construct
  source 1..41: mol_type = other RNA
atagattgctccttacgaggagaccccaaagctacacaggg

SEQ ID NO: 1420 - RNA, 41 nt, synthetic construct
  source 1..41: mol_type = other RNA
atagattgctccttacgaggagactgctccatcccacccac

SEQ ID NO: 1421 - RNA, 41 nt, synthetic construct
  source 1..41: mol_type = other RNA
atagattgctccttacgaggagacatgttcagtctggtggg

SEQ ID NO: 1422 - RNA, 41 nt, synthetic construct
  source 1..41: mol_type = other RNA
atagattgctccttacgaggagacctgctccatcccaccca

SEQ ID NO: 1423 - RNA, 41 nt, synthetic construct
  source 1..41: mol_type = other RNA
atagattgctccttacgaggagacatccctagaggcagctg

SEQ ID NO: 1424 - RNA, 41 nt, synthetic construct
  source 1..41: mol_type = other RNA
atagattgctccttacgaggagacgacagcccagtcctacc

SEQ ID NO: 1425 - RNA, 41 nt, synthetic construct
  source 1..41: mol_type = other RNA
atagattgctccttacgaggagacgggctggtggagggagg

SEQ ID NO: 1426 - RNA, 41 nt, synthetic construct
  source 1..41: mol_type = other RNA
atagattgctccttacgaggagacctgagctcatctgggct

SEQ ID NO: 1427 - RNA, 41 nt, synthetic construct
  source 1..41: mol_type = other RNA
atagattgctccttacgaggagacggcctcgatccctcgcc

SEQ ID NO: 1428 - RNA, 41 nt, synthetic construct
  source 1..41: mol_type = other RNA
atagattgctccttacgaggagactcaagtctgaagaagcc

SEQ ID NO: 1429 - RNA, 41 nt, synthetic construct
  source 1..41: mol_type = other RNA
atagattgctccttacgaggagaccccctctcaccagcctc

SEQ ID NO: 1430 - RNA, 41 nt, synthetic construct
  source 1..41: mol_type = other RNA
atagattgctccttacgaggagacttctcaagtctgaagaa

SEQ ID NO: 1431 - RNA, 41 nt, synthetic construct
  source 1..41: mol_type = other RNA
atagattgctccttacgaggagacccccctcattcttcagg

SEQ ID NO: 1432 - RNA, 41 nt, synthetic construct
  source 1..41: mol_type = other RNA
atagattgctccttacgaggagacggctggggggtgtttgg

SEQ ID NO: 1433 - RNA, 41 nt, synthetic construct
  source 1..41: mol_type = other RNA
atagattgctccttacgaggagacggaaatccctaggagac

SEQ ID NO: 1434 - RNA, 41 nt, synthetic construct
  source 1..41: mol_type = other RNA
atagattgctccttacgaggagacagaacaagtgggtggct

SEQ ID NO: 1435 - RNA, 41 nt, synthetic construct
  source 1..41: mol_type = other RNA
atagattgctccttacgaggagactatcatctccagggcag

SEQ ID NO: 1436 - RNA, 41 nt, synthetic construct
  source 1..41: mol_type = other RNA
atagattgctccttacgaggagaccaggcccctccctccac

SEQ ID NO: 1437 - RNA, 41 nt, synthetic construct
  source 1..41: mol_type = other RNA
atagattgctccttacgaggagaccctggagcagctgcctc

SEQ ID NO: 1438 - RNA, 41 nt, synthetic construct
  source 1..41: mol_type = other RNA
atagattgctccttacgaggagacaggttatgatgaggggt

SEQ ID NO: 1439 - RNA, 41 nt, synthetic construct
  source 1..41: mol_type = other RNA
atagattgctccttacgaggagacctggctgggctgggcag

SEQ ID NO: 1440 - RNA, 41 nt, synthetic construct
  source 1..41: mol_type = other RNA
atagattgctccttacgaggagacctagctgactggctccc

SEQ ID NO: 1441 - RNA, 41 nt, synthetic construct
  source 1..41: mol_type = other RNA
atagattgctccttacgaggagacttcagacttgagaacaa

SEQ ID NO: 1442 - RNA, 41 nt, synthetic construct
  source 1..41: mol_type = other RNA
atagattgctccttacgaggagacgagtaaaggcacagaag

SEQ ID NO: 1443 - RNA, 41 nt, synthetic construct
  source 1..41: mol_type = other RNA
atagattgctccttacgaggagacggcaagtgacacccctc

SEQ ID NO: 1444 - RNA, 41 nt, synthetic construct
  source 1..41: mol_type = other RNA
atagattgctccttacgaggagactgatgaggggtgggggg

SEQ ID NO: 1445 - RNA, 41 nt, synthetic construct
  source 1..41: mol_type = other RNA
atagattgctccttacgaggagactggccctctccaggcct

SEQ ID NO: 1446 - RNA, 41 nt, synthetic construct
  source 1..41: mol_type = other RNA
atagattgctccttacgaggagacttcaggttatgatgagg

SEQ ID NO: 1447 - RNA, 41 nt, synthetic construct
  source 1..41: mol_type = other RNA
atagattgctccttacgaggagactatatcatctccagggc

SEQ ID NO: 1448 - RNA, 41 nt, synthetic construct; identical to SEQ ID NO: 73
  source 1..41: mol_type = other RNA

SEQ ID NO: 1449 - RNA, 41 nt, synthetic construct
  source 1..41: mol_type = other RNA
atagattgctccttacgaggagaccccctcttcatcctcct

SEQ ID NO: 1450 - RNA, 41 nt, synthetic construct
  source 1..41: mol_type = other RNA
atagattgctccttacgaggagactccaggcttgctggctg

SEQ ID NO: 1451 - RNA, 41 nt, synthetic construct
  source 1..41: mol_type = other RNA
atagattgctccttacgaggagaccacactggaatttcagg

SEQ ID NO: 1452 - RNA, 41 nt, synthetic construct
  source 1..41: mol_type = other RNA
atagattgctccttacgaggagaccctgtctggggtaggac

SEQ ID NO: 1453 - RNA, 41 nt, synthetic construct
  source 1..41: mol_type = other RNA
atagattgctccttacgaggagacgctctagcaagtgcttc

SEQ ID NO: 1454 - RNA, 41 nt, synthetic construct
  source 1..41: mol_type = other RNA
atagattgctccttacgaggagacctggccctctccaggcc

SEQ ID NO: 1455 - RNA, 41 nt, synthetic construct
  source 1..41: mol_type = other RNA
atagattgctccttacgaggagacagacttgagaacaagtg

SEQ ID NO: 1456 - RNA, 41 nt, synthetic construct
  source 1..41: mol_type = other RNA
atagattgctccttacgaggagacggagtaaaggcacagaa

SEQ ID NO: 1457 - RNA, 41 nt, synthetic construct; identical to SEQ ID NO: 74
  source 1..41: mol_type = other RNA

SEQ ID NO: 1458 - RNA, 41 nt, synthetic construct
  source 1..41: mol_type = other RNA
atagattgctccttacgaggagacgagccacttccagcccc

SEQ ID NO: 1459 - RNA, 41 nt, synthetic construct
  source 1..41: mol_type = other RNA
atagattgctccttacgaggagaccttcctagctgactggc

SEQ ID NO: 1460 - RNA, 41 nt, synthetic construct
  source 1..41: mol_type = other RNA
atagattgctccttacgaggagacctccagccctaagcctg

SEQ ID NO: 1461 - RNA, 41 nt, synthetic construct
  source 1..41: mol_type = other RNA
atagattgctccttacgaggagactgacctgttttatatca

SEQ ID NO: 1462 - RNA, 41 nt, synthetic construct
  source 1..41: mol_type = other RNA
atagattgctccttacgaggagaccagccccaccccctgtg

SEQ ID NO: 1463 - RNA, 41 nt, synthetic construct
  source 1..41: mol_type = other RNA
atagattgctccttacgaggagacaggcccctccctccacc

SEQ ID NO: 1464 - RNA, 41 nt, synthetic construct
  source 1..41: mol_type = other RNA
atagattgctccttacgaggagaccttagctctagcaagtg

SEQ ID NO: 1465 - RNA, 41 nt, synthetic construct
  source 1..41: mol_type = other RNA
atagattgctccttacgaggagacgggcaagtgacacccct

SEQ ID NO: 1466 - RNA, 41 nt, synthetic construct
  source 1..41: mol_type = other RNA
atagattgctccttacgaggagacccctgtctggggtagga

SEQ ID NO: 1467 - RNA, 41 nt, synthetic construct
  source 1..41: mol_type = other RNA
atagattgctccttacgaggagacggtgatttctggccctc

SEQ ID NO: 1468 - RNA, 41 nt, synthetic construct
  source 1..41: mol_type = other RNA
atagattgctccttacgaggagacgggtgatttctggccct

SEQ ID NO: 1469 - RNA, 41 nt, synthetic construct
  source 1..41: mol_type = other RNA
atagattgctccttacgaggagacacactggaatttcaggc

SEQ ID NO: 1470 - RNA, 41 nt, synthetic construct
  source 1..41: mol_type = other RNA
atagattgctccttacgaggagacgacataggccaggggcc

SEQ ID NO: 1471 - RNA, 41 nt, synthetic construct
  source 1..41: mol_type = other RNA
atagattgctccttacgaggagacatatcatctccagggca

SEQ ID NO: 1472 - RNA, 41 nt, synthetic construct
  source 1..41: mol_type = other RNA
atagattgctccttacgaggagacatcctcctcccctcctc

SEQ ID NO: 1473 - RNA, 41 nt, synthetic construct
  source 1..41: mol_type = other RNA
atagattgctccttacgaggagactcccactgatattagat

SEQ ID NO: 1474 - RNA, 41 nt, synthetic construct
  source 1..41: mol_type = other RNA
atagattgctccttacgaggagactggcccatagcctccct

SEQ ID NO: 1475 - RNA, 41 nt, synthetic construct
  source 1..41: mol_type = other RNA
atagattgctccttacgaggagaccaggcagctctgccact

SEQ ID NO: 1476 - RNA, 41 nt, synthetic construct
  source 1..41: mol_type = other RNA
atagattgctccttacgaggagaccagtagaatggaatggg

SEQ ID NO: 1477 - RNA, 41 nt, synthetic construct
  source 1..41: mol_type = other RNA
atagattgctccttacgaggagactattggctccaggatgg

SEQ ID NO: 1478 - RNA, 41 nt, synthetic construct
  source 1..41: mol_type = other RNA
atagattgctccttacgaggagaccttcctctcctccccag

SEQ ID NO: 1479 - RNA, 41 nt, synthetic construct
  source 1..41: mol_type = other RNA
atagattgctccttacgaggagaccagtcctgggtaggcat

SEQ ID NO: 1480 - RNA, 41 nt, synthetic construct
  source 1..41: mol_type = other RNA
atagattgctccttacgaggagaccctggagtagctagctg

SEQ ID NO: 1481 - RNA, 41 nt, synthetic construct
  source 1..41: mol_type = other RNA
atagattgctccttacgaggagaccccagcttctagccccc

SEQ ID NO: 1482 - RNA, 41 nt, synthetic construct
  source 1..41: mol_type = other RNA
atagattgctccttacgaggagactccctccagctctttgt

SEQ ID NO: 1483 - RNA, 41 nt, synthetic construct
  source 1..41: mol_type = other RNA
atagattgctccttacgaggagacccttccttcctctcctc

SEQ ID NO: 1484 - RNA, 41 nt, synthetic construct
  source 1..41: mol_type = other RNA
atagattgctccttacgaggagacctcgctaggactcagtt

SEQ ID NO: 1485 - RNA, 41 nt, synthetic construct
  source 1..41: mol_type = other RNA
atagattgctccttacgaggagacagaaatccctctgagat

SEQ ID NO: 1486 - RNA, 41 nt, synthetic construct
  source 1..41: mol_type = other RNA
atagattgctccttacgaggagacgtttcttcccttccttc

SEQ ID NO: 1487 - RNA, 41 nt, synthetic construct
  source 1..41: mol_type = other RNA
atagattgctccttacgaggagacttcagtcctgggtaggc

SEQ ID NO: 1488 - RNA, 41 nt, synthetic construct
  source 1..41: mol_type = other RNA
atagattgctccttacgaggagaccccatgcttttcacggc

SEQ ID NO: 1489 - RNA, 41 nt, synthetic construct
  source 1..41: mol_type = other RNA
atagattgctccttacgaggagacttcccttccttcctctc

SEQ ID NO: 1490 - RNA, 41 nt, synthetic construct
  source 1..41: mol_type = other RNA
atagattgctccttacgaggagaccatgcccccacactgac

SEQ ID NO: 1491 - RNA, 41 nt, synthetic construct
  source 1..41: mol_type = other RNA
atagattgctccttacgaggagaccttttcctcgctaggac

SEQ ID NO: 1492 - RNA, 41 nt, synthetic construct
  source 1..41: mol_type = other RNA
atagattgctccttacgaggagaccctcgctaggactcagt

SEQ ID NO: 1493 - RNA, 41 nt, synthetic construct
  source 1..41: mol_type = other RNA
atagattgctccttacgaggagactatattggctccaggat

SEQ ID NO: 1494 - RNA, 41 nt, synthetic construct
  source 1..41: mol_type = other RNA
atagattgctccttacgaggagacgctccaggatgggacag

SEQ ID NO: 1495 - RNA, 41 nt, synthetic construct
  source 1..41: mol_type = other RNA
atagattgctccttacgaggagaccacggccacctccgcca

SEQ ID NO: 1496 - RNA, 41 nt, synthetic construct
  source 1..41: mol_type = other RNA
atagattgctccttacgaggagactagccccccccacacca

SEQ ID NO: 1497 - RNA, 41 nt, synthetic construct
  source 1..41: mol_type = other RNA
atagattgctccttacgaggagactttcagtcctgggtagg

SEQ ID NO: 1498 - RNA, 41 nt, synthetic construct
  source 1..41: mol_type = other RNA
atagattgctccttacgaggagacggcccatagcctccctt

SEQ ID NO: 1499 - RNA, 41 nt, synthetic construct
  source 1..41: mol_type = other RNA
atagattgctccttacgaggagaccttcccttccttcctct

SEQ ID NO: 1500 - RNA, 41 nt, synthetic construct
  source 1..41: mol_type = other RNA
atagattgctccttacgaggagacgacctcaggcctgcttt

SEQ ID NO: 1501 - RNA, 41 nt, synthetic construct
  source 1..41: mol_type = other RNA
atagattgctccttacgaggagacccccagcttctagcccc

SEQ ID NO: 1502 - RNA, 41 nt, synthetic construct
  source 1..41: mol_type = other RNA
atagattgctccttacgaggagactttcttcccttccttcc

SEQ ID NO: 1503 - RNA, 41 nt, synthetic construct
  source 1..41: mol_type = other RNA
atagattgctccttacgaggagactagggataaaactgagc

SEQ ID NO: 1504 - RNA, 41 nt, synthetic construct
  source 1..41: mol_type = other RNA
atagattgctccttacgaggagacatattggctccaggatg

SEQ ID NO: 1505 - RNA, 41 nt, synthetic construct
  source 1..41: mol_type = other RNA
atagattgctccttacgaggagacacggccacctccgccac

SEQ ID NO: 1506 - RNA, 41 nt, synthetic construct
  source 1..41: mol_type = other RNA
atagattgctccttacgaggagacacagcctagagccagtg

SEQ ID NO: 1507 - RNA, 41 nt, synthetic construct
  source 1..41: mol_type = other RNA
atagattgctccttacgaggagacacagaagccacctgaaa

SEQ ID NO: 1508 - RNA, 41 nt, synthetic construct
  source 1..41: mol_type = other RNA
atagattgctccttacgaggagactcagtcctgggtaggca

SEQ ID NO: 1509 - RNA, 41 nt, synthetic construct
  source 1..41: mol_type = other RNA
atagattgctccttacgaggagactcacggccacctccgcc

SEQ ID NO: 1510 - RNA, 41 nt, synthetic construct
  source 1..41: mol_type = other RNA
atagattgctccttacgaggagactcctcgctaggactcag

SEQ ID NO: 1511 - RNA, 41 nt, synthetic construct
  source 1..41: mol_type = other RNA
atagattgctccttacgaggagacctcccactgatattaga

SEQ ID NO: 1512 - RNA, 41 nt, synthetic construct
  source 1..41: mol_type = other RNA
atagattgctccttacgaggagacttttcctcgctaggact

SEQ ID NO: 1513 - RNA, 41 nt, synthetic construct
  source 1..41: mol_type = other RNA
atagattgctccttacgaggagactgtgggctagatggctg

SEQ ID NO: 1514 - RNA, 41 nt, synthetic construct
  source 1..41: mol_type = other RNA
atagattgctccttacgaggagacgcccatagcctcccttt

SEQ ID NO: 1515 - RNA, 41 nt, synthetic construct
  source 1..41: mol_type = other RNA
atagattgctccttacgaggagactaatagctcagagcaag

SEQ ID NO: 1516 - RNA, 41 nt, synthetic construct
  source 1..41: mol_type = other RNA
atagattgctccttacgaggagacagtcctgggtaggcatg

SEQ ID NO: 1517 - RNA, 41 nt, synthetic construct
  source 1..41: mol_type = other RNA
atagattgctccttacgaggagaccagcctagagccagtga

SEQ ID NO: 1518 - RNA, 41 nt, synthetic construct
  source 1..41: mol_type = other RNA
atagattgctccttacgaggagacctctcctccccaggggc

SEQ ID NO: 1519 - RNA, 41 nt, synthetic construct
  source 1..41: mol_type = other RNA
atagattgctccttacgaggagacgatagagaactacagta

SEQ ID NO: 1520 - RNA, 41 nt, synthetic construct
  source 1..41: mol_type = other RNA
atagattgctccttacgaggagacgtggcggaggtggccgt

SEQ ID NO: 1521 - RNA, 41 nt, synthetic construct
  source 1..41: mol_type = other RNA
atagattgctccttacgaggagacggtcatgctgtcccttg

SEQ ID NO: 1522 - RNA, 41 nt, synthetic construct
  source 1..41: mol_type = other RNA
atagattgctccttacgaggagacggttcctggtgtggggg

SEQ ID NO: 1523 - RNA, 41 nt, synthetic construct
  source 1..41: mol_type = other RNA
atagattgctccttacgaggagactcagcatattagagtag

SEQ ID NO: 1524 - RNA, 41 nt, synthetic construct
  source 1..41: mol_type = other RNA
atagattgctccttacgaggagactatccctagaagcagct

SEQ ID NO: 1525 - RNA, 41 nt, synthetic construct
  source 1..41: mol_type = other RNA
atagattgctccttacgaggagactctatctaatatcagtg

SEQ ID NO: 1526 - RNA, 41 nt, synthetic construct
  source 1..41: mol_type = other RNA
atagattgctccttacgaggagacctatactccaccttcca

SEQ ID NO: 1527 - RNA, 41 nt, synthetic construct
  source 1..41: mol_type = other RNA
atagattgctccttacgaggagaccccattccattctactg

SEQ ID NO: 1528 - RNA, 41 nt, synthetic construct
  source 1..41: mol_type = other RNA
atagattgctccttacgaggagacctccgttgctccacagt

SEQ ID NO: 1529 - RNA, 41 nt, synthetic construct
  source 1..41: mol_type = other RNA
atagattgctccttacgaggagactcccctgtcttttcctg

SEQ ID NO: 1530 - RNA, 41 nt, synthetic construct
  source 1..41: mol_type = other RNA
atagattgctccttacgaggagacatccctagaagcagcta

SEQ ID NO: 1531 - RNA, 41 nt, synthetic construct
  source 1..41: mol_type = other RNA
atagattgctccttacgaggagaccaccccacttggggggc

SEQ ID NO: 1532 - RNA, 41 nt, synthetic construct
  source 1..41: mol_type = other RNA
atagattgctccttacgaggagactttctcagcatattaga

SEQ ID NO: 1533 - RNA, 41 nt, synthetic construct
  source 1..41: mol_type = other RNA
atagattgctccttacgaggagaccaggtggcttctgtgaa

SEQ ID NO: 1534 - RNA, 41 nt, synthetic construct
  source 1..41: mol_type = other RNA
atagattgctccttacgaggagaccccagctcactgggcct

SEQ ID NO: 1535 - RNA, 41 nt, synthetic construct
  source 1..41: mol_type = other RNA
atagattgctccttacgaggagacctcagcatattagagta

SEQ ID NO: 1536 - RNA, 41 nt, synthetic construct
  source 1..41: mol_type = other RNA
atagattgctccttacgaggagaccattctactggaaggct

SEQ ID NO: 1537 - RNA, 41 nt, synthetic construct
  source 1..41: mol_type = other RNA
atagattgctccttacgaggagactcctgtctcaccgacct

SEQ ID NO: 1538 - RNA, 41 nt, synthetic construct
  source 1..41: mol_type = other RNA
atagattgctccttacgaggagacgtatccatgcctaccca

SEQ ID NO: 1539 - RNA, 41 nt, synthetic construct
  source 1..41: mol_type = other RNA
atagattgctccttacgaggagacaggtggcttctgtgaag

SEQ ID NO: 1540 - RNA, 41 nt, synthetic construct
  source 1..41: mol_type = other RNA
atagattgctccttacgaggagacggatcacaggtggaggt

SEQ ID NO: 1541 - RNA, 41 nt, synthetic construct
  source 1..41: mol_type = other RNA
atagattgctccttacgaggagactttagcttgctctgagc

SEQ ID NO: 1542 - RNA, 41 nt, synthetic construct
  source 1..41: mol_type = other RNA
atagattgctccttacgaggagacgaagcctttggtatcca

SEQ ID NO: 1543 - RNA, 41 nt, synthetic construct
  source 1..41: mol_type = other RNA
atagattgctccttacgaggagacctgtctcaccgacctca

SEQ ID NO: 1544 - RNA, 41 nt, synthetic construct
  source 1..41: mol_type = other RNA
atagattgctccttacgaggagactgtgaaggagcctgtca

SEQ ID NO: 1545 - RNA, 41 nt, synthetic construct
  source 1..41: mol_type = other RNA
atagattgctccttacgaggagacactctgccccctcccac

SEQ ID NO: 1546 - RNA, 41 nt, synthetic construct
  source 1..41: mol_type = other RNA
atagattgctccttacgaggagactctcactaatccctgcc

SEQ ID NO: 1547 - RNA, 41 nt, synthetic construct
  source 1..41: mol_type = other RNA
atagattgctccttacgaggagactactggaaggctttcag

SEQ ID NO: 1548 - RNA, 41 nt, synthetic construct
  source 1..41: mol_type = other RNA
atagattgctccttacgaggagactatactccaccttccac

SEQ ID NO: 1549 - RNA, 41 nt, synthetic construct
  source 1..41: mol_type = other RNA
atagattgctccttacgaggagacgcccagctcactgggcc

SEQ ID NO: 1550 - RNA, 41 nt, synthetic construct
  source 1..41: mol_type = other RNA
atagattgctccttacgaggagacctctgagctattagaag

SEQ ID NO: 1551 - RNA, 41 nt, synthetic construct
  source 1..41: mol_type = other RNA
atagattgctccttacgaggagacgggggctgggtctactg

SEQ ID NO: 1552 - RNA, 41 nt, synthetic construct
  source 1..41: mol_type = other RNA
atagattgctccttacgaggagacggattcatgacccagga

SEQ ID NO: 1553 - RNA, 41 nt, synthetic construct
  source 1..41: mol_type = other RNA
atagattgctccttacgaggagaccctgctcagttttatcc

SEQ ID NO: 1554 - RNA, 41 nt, synthetic construct
  source 1..41: mol_type = other RNA
atagattgctccttacgaggagacctcaactcctctggcag

SEQ ID NO: 1555 - RNA, 41 nt, synthetic construct
  source 1..41: mol_type = other RNA
atagattgctccttacgaggagacctgcctcaggctctggt

SEQ ID NO: 1556 - RNA, 41 nt, synthetic construct
  source 1..41: mol_type = other RNA
atagattgctccttacgaggagactgtgcccgctgtcccat

SEQ ID NO: 1557 - RNA, 41 nt, synthetic construct
  source 1..41: mol_type = other RNA
atagattgctccttacgaggagactccttctctcactaatc

SEQ ID NO: 1558 - RNA, 41 nt, synthetic construct
  source 1..41: mol_type = other RNA
atagattgctccttacgaggagacgcttgctctgagctatt

SEQ ID NO: 1559 - RNA, 41 nt, synthetic construct
  source 1..41: mol_type = other RNA
atagattgctccttacgaggagactcaactcctctggcaga

SEQ ID NO: 1560 - RNA, 41 nt, synthetic construct
  source 1..41: mol_type = other RNA
atagattgctccttacgaggagaccctgtctcaccgacctc

SEQ ID NO: 1561 - RNA, 41 nt, synthetic construct
  source 1..41: mol_type = other RNA
atagattgctccttacgaggagacctccacagtggcaccac

SEQ ID NO: 1562 - RNA, 41 nt, synthetic construct
  source 1..41: mol_type = other RNA
atagattgctccttacgaggagactccctagaagcagctag

SEQ ID NO: 1563 - RNA, 41 nt, synthetic construct
  source 1..41: mol_type = other RNA
atagattgctccttacgaggagacggactcatggtctccac

SEQ ID NO: 1564 - RNA, 41 nt, synthetic construct
  source 1..41: mol_type = other RNA
atagattgctccttacgaggagacagcttgctctgagctat

SEQ ID NO: 1565 - RNA, 41 nt, synthetic construct
  source 1..41: mol_type = other RNA
atagattgctccttacgaggagacggtatccatgcctaccc

SEQ ID NO: 1566 - RNA, 41 nt, synthetic construct
  source 1..41: mol_type = other RNA
atagattgctccttacgaggagacctggtgtggggggggct

SEQ ID NO: 1567 - RNA, 41 nt, synthetic construct
  source 1..41: mol_type = other RNA
atagattgctccttacgaggagaccactgggtagtggcaga

SEQ ID NO: 1568 - RNA, 41 nt, synthetic construct
  source 1..41: mol_type = other RNA
atagattgctccttacgaggagactgcagagtatttctata

SEQ ID NO: 1569 - RNA, 41 nt, synthetic construct
  source 1..41: mol_type = other RNA
atagattgctccttacgaggagacgagtagatgtcccgttc

SEQ ID NO: 1570 - RNA, 89 nt, synthetic construct
  source 1..89: mol_type = other RNA
acagcttatttggaagctgaaatgtgaggtttataacactcacaagaatcctgaaaaaggatgccaaacgacagcccagtcctacccca

SEQ ID NO: 1571 - RNA, 89 nt, synthetic construct
  source 1..89: mol_type = other RNA
acagcttatttggaagctgaaatgtgaggtttataacactcacaagaatcctgaaaaaggatgccaaacttcagggcttggggctggtg

SEQ ID NO: 1572 - RNA, 89 nt, synthetic construct
  source 1..89: mol_type = other RNA
acagcttatttggaagctgaaatgtgaggtttataacactcacaagaatcctgaaaaaggatgccaaaccctttactccaaacaccccc

SEQ ID NO: 1573 - RNA, 89 nt, synthetic construct
  source 1..89: mol_type = other RNA
acagcttatttggaagctgaaatgtgaggtttataacactcacaagaatcctgaaaaaggatgccaaacccccccacccctcatcataa

SEQ ID NO: 1574 - RNA, 89 nt, synthetic construct
  source 1..89: mol_type = other RNA
acagcttatttggaagctgaaatgtgaggtttataacactcacaagaatcctgaaaaaggatgccaaacttcagtctggtgggttttct

SEQ ID NO: 1575 - RNA, 89 nt, synthetic construct
  source 1..89: mol_type = other RNA
acagcttatttggaagctgaaatgtgaggtttataacactcacaagaatcctgaaaaaggatgccaaactcacttgcccaaagctacac

SEQ ID NO: 1576 - RNA, 89 nt, synthetic construct
  source 1..89: mol_type = other RNA
acagcttatttggaagctgaaatgtgaggtttataacactcacaagaatcctgaaaaaggatgccaaacgtgggttttctgctccatcc

SEQ ID NO: 1577 - RNA, 89 nt, synthetic construct
  source 1..89: mol_type = other RNA
acagcttatttggaagctgaaatgtgaggtttataacactcacaagaatcctgaaaaaggatgccaaacccggagccactgatgcctgg

SEQ ID NO: 1578 - RNA, 89 nt, synthetic construct
  source 1..89: mol_type = other RNA
acagcttatttggaagctgaaatgtgaggtttataacactcacaagaatcctgaaaaaggatgccaaacgactcagtctcctagggatt

SEQ ID NO: 1579 - RNA, 89 nt, synthetic construct
  source 1..89: mol_type = other RNA
acagcttatttggaagctgaaatgtgaggtttataacactcacaagaatcctgaaaaaggatgccaaacgcctatgtccaagccatttc

SEQ ID NO: 1580 - RNA, 89 nt, synthetic construct
  source 1..89: mol_type = other RNA
acagcttatttggaagctgaaatgtgaggtttataacactcacaagaatcctgaaaaaggatgccaaaccctcaggccctcatctccac

SEQ ID NO: 1581 - RNA, 89 nt, synthetic construct
  source 1..89: mol_type = other RNA
acagcttatttggaagctgaaatgtgaggtttataacactcacaagaatcctgaaaaaggatgccaaactccaagccatttcccctctc

SEQ ID NO: 1582 - RNA, 89 nt, synthetic construct
  source 1..89: mol_type = other RNA
acagcttatttggaagctgaaatgtgaggtttataacactcacaagaatcctgaaaaaggatgccaaacaaaggctgagatgggcccga

SEQ ID NO: 1583 - RNA, 89 nt, synthetic construct
  source 1..89: mol_type = other RNA
acagcttatttggaagctgaaatgtgaggtttataacactcacaagaatcctgaaaaaggatgccaaacaaattccagtgtgaaaggct

SEQ ID NO: 1584 - RNA, 89 nt, synthetic construct
  source 1..89: mol_type = other RNA
acagcttatttggaagctgaaatgtgaggtttataacactcacaagaatcctgaaaaaggatgccaaacgagatgatataaaacaggtc

SEQ ID NO: 1585 - RNA, 89 nt, synthetic construct
  source 1..89: mol_type = other RNA
acagcttatttggaagctgaaatgtgaggtttataacactcacaagaatcctgaaaaaggatgccaaacgggaggggaaagaggagggg

SEQ ID NO: 1586 - RNA, 89 nt, synthetic construct
  source 1..89: mol_type = other RNA
acagcttatttggaagctgaaatgtgaggtttataacactcacaagaatcctgaaaaaggatgccaaacaagaacatggaggcccggga

SEQ ID NO: 1587 - RNA, 89 nt, synthetic construct
  source 1..89: mol_type = other RNA
acagcttatttggaagctgaaatgtgaggtttataacactcacaagaatcctgaaaaaggatgccaaacgggctggtggagggaggggc

SEQ ID NO: 1588 - RNA, 89 nt, synthetic construct
  source 1..89: mol_type = other RNA
acagcttatttggaagctgaaatgtgaggtttataacactcacaagaatcctgaaaaaggatgccaaacatgcctggtcttctgtgcct

SEQ ID NO: 1589 - RNA, 89 nt, synthetic construct
  source 1..89: mol_type = other RNA
acagcttatttggaagctgaaatgtgaggtttataacactcacaagaatcctgaaaaaggatgccaaactgttcagggcttggggctgg

SEQ ID NO: 1590 - RNA, 89 nt, synthetic construct
  source 1..89: mol_type = other RNA
acagcttatttggaagctgaaatgtgaggtttataacactcacaagaatcctgaaaaaggatgccaaacctccaggtaatgccctctgg

SEQ ID NO: 1591 - RNA, 89 nt, synthetic construct
  source 1..89: mol_type = other RNA
acagcttatttggaagctgaaatgtgaggtttataacactcacaagaatcctgaaaaaggatgccaaacagggctccccaggcccaccc

SEQ ID NO: 1592 - RNA, 89 nt, synthetic construct
  source 1..89: mol_type = other RNA
acagcttatttggaagctgaaatgtgaggtttataacactcacaagaatcctgaaaaaggatgccaaacttggctggactggacggaga

SEQ ID NO: 1593 - RNA, 89 nt, synthetic construct
  source 1..89: mol_type = other RNA
acagcttatttggaagctgaaatgtgaggtttataacactcacaagaatcctgaaaaaggatgccaaacgagctaaggaagcctcggag

SEQ ID NO: 1594 - RNA, 89 nt, synthetic construct
  source 1..89: mol_type = other RNA
acagcttatttggaagctgaaatgtgaggtttataacactcacaagaatcctgaaaaaggatgccaaacccctctggggaggggaaaga

SEQ ID NO: 1595 - RNA, 89 nt, synthetic construct
  source 1..89: mol_type = other RNA
acagcttatttggaagctgaaatgtgaggtttataacactcacaagaatcctgaaaaaggatgccaaacctccaaacaccccccagccc

SEQ ID NO: 1596 - RNA, 89 nt, synthetic construct
  source 1..89: mol_type = other RNA
acagcttatttggaagctgaaatgtgaggtttataacactcacaagaatcctgaaaaaggatgccaaacgggagccagtcagctaggaa

SEQ ID NO: 1597 - RNA, 89 nt, synthetic construct
  source 1..89: mol_type = other RNA
acagcttatttggaagctgaaatgtgaggtttataacactcacaagaatcctgaaaaaggatgccaaacggcccgaggcccctggccta

SEQ ID NO: 1598 - RNA, 89 nt, synthetic construct
  source 1..89: mol_type = other RNA
acagcttatttggaagctgaaatgtgaggtttataacactcacaagaatcctgaaaaaggatgccaaacgaggcagctgctccaggtaa

SEQ ID NO: 1599 - RNA, 89 nt, synthetic construct
  source 1..89: mol_type = other RNA
acagcttatttggaagctgaaatgtgaggtttataacactcacaagaatcctgaaaaaggatgccaaacgagggaggggcctgaaattc

SEQ ID NO: 1600 - RNA, 89 nt, synthetic construct
  source 1..89: mol_type = other RNA
acagcttatttggaagctgaaatgtgaggtttataacactcacaagaatcctgaaaaaggatgccaaacgagagggccagaaatcaccc

SEQ ID NO: 1601 - RNA, 89 nt, synthetic construct
  source 1..89: mol_type = other RNA
acagcttatttggaagctgaaatgtgaggtttataacactcacaagaatcctgaaaaaggatgccaaacaagaagcccctcacccctct

SEQ ID NO: 1602 - RNA, 89 nt, synthetic construct
  source 1..89: mol_type = other RNA
acagcttatttggaagctgaaatgtgaggtttataacactcacaagaatcctgaaaaaggatgccaaacccccagacagggaaactgag

SEQ ID NO: 1603 - RNA, 89 nt, synthetic construct
  source 1..89: mol_type = other RNA
acagcttatttggaagctgaaatgtgaggtttataacactcacaagaatcctgaaaaaggatgccaaacgggctggaagtggctccaag

SEQ ID NO: 1604 - RNA, 89 nt, synthetic construct
  source 1..89: mol_type = other RNA
acagcttatttggaagctgaaatgtgaggtttataacactcacaagaatcctgaaaaaggatgccaaacctccaggctgtgttcagggc

SEQ ID NO: 1605 - RNA, 89 nt, synthetic construct
  source 1..89: mol_type = other RNA
acagcttatttggaagctgaaatgtgaggtttataacactcacaagaatcctgaaaaaggatgccaaacgtcttctgtgcctttactcc

SEQ ID NO: 1606 - RNA, 89 nt, synthetic construct
  source 1..89: mol_type = other RNA
acagcttatttggaagctgaaatgtgaggtttataacactcacaagaatcctgaaaaaggatgccaaaccacagggggtggggctggaa

SEQ ID NO: 1607 - RNA, 89 nt, synthetic construct
  source 1..89: mol_type = other RNA
acagcttatttggaagctgaaatgtgaggtttataacactcacaagaatcctgaaaaaggatgccaaacgactggacggagatcagtcc

SEQ ID NO: 1608 - RNA, 89 nt, synthetic construct
  source 1..89: mol_type = other RNA
acagcttatttggaagctgaaatgtgaggtttataacactcacaagaatcctgaaaaaggatgccaaacgacgggtgccccccacccct

SEQ ID NO: 1609 - RNA, 89 nt, synthetic construct
  source 1..89: mol_type = other RNA
acagcttatttggaagctgaaatgtgaggtttataacactcacaagaatcctgaaaaaggatgccaaactgtccaagccatttcccctc

SEQ ID NO: 1610 - RNA, 89 nt, synthetic construct
  source 1..89: mol_type = other RNA
acagcttatttggaagctgaaatgtgaggtttataacactcacaagaatcctgaaaaaggatgccaaacagatgggcccgaggcccctg

SEQ ID NO: 1611 - RNA, 89 nt, synthetic construct
  source 1..89: mol_type = other RNA
acagcttatttggaagctgaaatgtgaggtttataacactcacaagaatcctgaaaaaggatgccaaacggtcctcagtgcctgctgcc

SEQ ID NO: 1612 - RNA, 89 nt, synthetic construct
  source 1..89: mol_type = other RNA
acagcttatttggaagctgaaatgtgaggtttataacactcacaagaatcctgaaaaaggatgccaaaccagggctggcgggacagcag

SEQ ID NO: 1613 - RNA, 89 nt, synthetic construct
  source 1..89: mol_type = other RNA
acagcttatttggaagctgaaatgtgaggtttataacactcacaagaatcctgaaaaaggatgccaaacccttgatgttcagtctggtg

SEQ ID NO: 1614 - RNA, 89 nt, synthetic construct
  source 1..89: mol_type = other RNA
acagcttatttggaagctgaaatgtgaggtttataacactcacaagaatcctgaaaaaggatgccaaacaggcctggagagggccagaa

SEQ ID NO: 1615 - RNA, 89 nt, synthetic construct
  source 1..89: mol_type = other RNA
acagcttatttggaagctgaaatgtgaggtttataacactcacaagaatcctgaaaaaggatgccaaacccctggagatgatataaaac

SEQ ID NO: 1616 - RNA, 89 nt, synthetic construct
  source 1..89: mol_type = other RNA
acagcttatttggaagctgaaatgtgaggtttataacactcacaagaatcctgaaaaaggatgccaaacacctgaagaacatggaggcc

SEQ ID NO: 1617 - RNA, 89 nt, synthetic construct
  source 1..89: mol_type = other RNA
acagcttatttggaagctgaaatgtgaggtttataacactcacaagaatcctgaaaaaggatgccaaaccctggtcttctgtgccttta

SEQ ID NO: 1618 - RNA, 89 nt, synthetic construct
  source 1..89: mol_type = other RNA
acagcttatttggaagctgaaatgtgaggtttataacactcacaagaatcctgaaaaaggatgccaaacacctttgcccagcgccctgg

SEQ ID NO: 1619 - RNA, 89 nt, synthetic construct
  source 1..89: mol_type = other RNA
acagcttatttggaagctgaaatgtgaggtttataacactcacaagaatcctgaaaaaggatgccaaaccccaaagctacacagggggt

SEQ ID NO: 1620 - RNA, 89 nt, synthetic construct
  source 1..89: mol_type = other RNA
acagcttatttggaagctgaaatgtgaggtttataacactcacaagaatcctgaaaaaggatgccaaacgtggagggaggggcctgaaa

SEQ ID NO: 1621 - RNA, 89 nt, synthetic construct
  source 1..89: mol_type = other RNA
acagcttatttggaagctgaaatgtgaggtttataacactcacaagaatcctgaaaaaggatgccaaactgcctttactccaaacaccc

SEQ ID NO: 1622 - RNA, 89 nt, synthetic construct
  source 1..89: mol_type = other RNA
acagcttatttggaagctgaaatgtgaggtttataacactcacaagaatcctgaaaaaggatgccaaacctccatcccacccacctccc

SEQ ID NO: 1623 - RNA, 89 nt, synthetic construct
  source 1..89: mol_type = other RNA
acagcttatttggaagctgaaatgtgaggtttataacactcacaagaatcctgaaaaaggatgccaaacatgttcagtctggtgggttt

SEQ ID NO: 1624 - RNA, 89 nt, synthetic construct
  source 1..89: mol_type = other RNA
acagcttatttggaagctgaaatgtgaggtttataacactcacaagaatcctgaaaaaggatgccaaacctagagctaaggaagcctcg

SEQ ID NO: 1625 - RNA, 89 nt, synthetic construct
  source 1..89: mol_type = other RNA
acagcttatttggaagctgaaatgtgaggtttataacactcacaagaatcctgaaaaaggatgccaaacggaaggaatgagggctcccc

SEQ ID NO: 1626 - RNA, 89 nt, synthetic construct
  source 1..89: mol_type = other RNA
acagcttatttggaagctgaaatgtgaggtttataacactcacaagaatcctgaaaaaggatgccaaacggctgcagggctggcgggac

SEQ ID NO: 1627 - RNA, 89 nt, synthetic construct
  source 1..89: mol_type = other RNA
acagcttatttggaagctgaaatgtgaggtttataacactcacaagaatcctgaaaaaggatgccaaacatgccctctggggaggggaa

SEQ ID NO: 1628 - RNA, 89 nt, synthetic construct
  source 1..89: mol_type = other RNA
acagcttatttggaagctgaaatgtgaggtttataacactcacaagaatcctgaaaaaggatgccaaacaaacaggtcagaaccctcct

SEQ ID NO: 1629 - RNA, 89 nt, synthetic construct
  source 1..89: mol_type = other RNA
acagcttatttggaagctgaaatgtgaggtttataacactcacaagaatcctgaaaaaggatgccaaacgggctggaggaagccttaga

SEQ ID NO: 1630 - RNA, 89 nt, synthetic construct
  source 1..89: mol_type = other RNA
acagcttatttggaagctgaaatgtgaggtttataacactcacaagaatcctgaaaaaggatgccaaacttctcaagtctgaagaagcc

SEQ ID NO: 1631 - RNA, 89 nt, synthetic construct
  source 1..89: mol_type = other RNA
acagcttatttggaagctgaaatgtgaggtttataacactcacaagaatcctgaaaaaggatgccaaacagctcatctgggctgcaggg

SEQ ID NO: 1632 - RNA, 89 nt, synthetic construct
  source 1..89: mol_type = other RNA
acagcttatttggaagctgaaatgtgaggtttataacactcacaagaatcctgaaaaaggatgccaaacgggatttcccaactctcccg

SEQ ID NO: 1633 - RNA, 89 nt, synthetic construct
  source 1..89: mol_type = other RNA
acagcttatttggaagctgaaatgtgaggtttataacactcacaagaatcctgaaaaaggatgccaaacgacggagatcagtccagacc

SEQ ID NO: 1634 - RNA, 89 nt, synthetic construct
  source 1..89: mol_type = other RNA
acagcttatttggaagctgaaatgtgaggtttataacactcacaagaatcctgaaaaaggatgccaaactgaaaggctgagatgggccc

SEQ ID NO: 1635 - RNA, 89 nt, synthetic construct
  source 1..89: mol_type = other RNA
acagcttatttggaagctgaaatgtgaggtttataacactcacaagaatcctgaaaaaggatgccaaaccctgtctgctcagttcatcc

SEQ ID NO: 1636 - RNA, 89 nt, synthetic construct
  source 1..89: mol_type = other RNA
acagcttatttggaagctgaaatgtgaggtttataacactcacaagaatcctgaaaaaggatgccaaaccaggttcccccctcattctt

SEQ ID NO: 1637 - RNA, 89 nt, synthetic construct
  source 1..89: mol_type = other RNA
acagcttatttggaagctgaaatgtgaggtttataacactcacaagaatcctgaaaaaggatgccaaacgtcagcaggtgacctttgcc

SEQ ID NO: 1638 - RNA, 89 nt, synthetic construct
  source 1..89: mol_type = other RNA
acagcttatttggaagctgaaatgtgaggtttataacactcacaagaatcctgaaaaaggatgccaaacgaggaagccttagacagccc

SEQ ID NO: 1639 - RNA, 89 nt, synthetic construct
  source 1..89: mol_type = other RNA
acagcttatttggaagctgaaatgtgaggtttataacactcacaagaatcctgaaaaaggatgccaaacctgcatctggacaccctgcc

SEQ ID NO: 1640 - RNA, 89 nt, synthetic construct
  source 1..89: mol_type = other RNA
acagcttatttggaagctgaaatgtgaggtttataacactcacaagaatcctgaaaaaggatgccaaaccccagcgccctgggtcctca

SEQ ID NO: 1641 - RNA, 89 nt, synthetic construct
  source 1..89: mol_type = other RNA
acagcttatttggaagctgaaatgtgaggtttataacactcacaagaatcctgaaaaaggatgccaaaccccagcccagccagcaagcc

SEQ ID NO: 1642 - RNA, 89 nt, synthetic construct
  source 1..89: mol_type = other RNA
acagcttatttggaagctgaaatgtgaggtttataacactcacaagaatcctgaaaaaggatgccaaacggttttctgctccatcccac

SEQ ID NO: 1643 - RNA, 89 nt, synthetic construct
  source 1..89: mol_type = other RNA
acagcttatttggaagctgaaatgtgaggtttataacactcacaagaatcctgaaaaaggatgccaaactaaaacaggtcagaaccctc

SEQ ID NO: 1644 - RNA, 89 nt, synthetic construct
  source 1..89: mol_type = other RNA
acagcttatttggaagctgaaatgtgaggtttataacactcacaagaatcctgaaaaaggatgccaaacctcagttcatccctagaggc

SEQ ID NO: 1645 - RNA, 89 nt, synthetic construct
  source 1..89: mol_type = other RNA
acagcttatttggaagctgaaatgtgaggtttataacactcacaagaatcctgaaaaaggatgccaaacgacaccctgcctcaggccct

SEQ ID NO: 1646 - RNA, 89 nt, synthetic construct
  source 1..89: mol_type = other RNA
acagcttatttggaagctgaaatgtgaggtttataacactcacaagaatcctgaaaaaggatgccaaacgcgggacagcagcgtggact

SEQ ID NO: 1647 - RNA, 89 nt, synthetic construct
  source 1..89: mol_type = other RNA
acagcttatttggaagctgaaatgtgaggtttataacactcacaagaatcctgaaaaaggatgccaaacaagaggggcaagaggagctc

SEQ ID NO: 1648 - RNA, 89 nt, synthetic construct
  source 1..89: mol_type = other RNA
acagcttatttggaagctgaaatgtgaggtttataacactcacaagaatcctgaaaaaggatgccaaaccatctggacaccctgcctca

SEQ ID NO: 1649 - RNA, 89 nt, synthetic construct
  source 1..89: mol_type = other RNA
acagcttatttggaagctgaaatgtgaggtttataacactcacaagaatcctgaaaaaggatgccaaacgaggcccgggaggggtgtca

SEQ ID NO: 1650 - RNA, 89 nt, synthetic construct
  source 1..89: mol_type = other RNA
acagcttatttggaagctgaaatgtgaggtttataacactcacaagaatcctgaaaaaggatgccaaaccctgctgccctggagatgat

SEQ ID NO: 1651 - RNA, 89 nt, synthetic construct
  source 1..89: mol_type = other RNA
acagcttatttggaagctgaaatgtgaggtttataacactcacaagaatcctgaaaaaggatgccaaacaggaagcctcggagctggac

SEQ ID NO: 1652 - RNA, 89 nt, synthetic construct
  source 1..89: mol_type = other RNA
acagcttatttggaagctgaaatgtgaggtttataacactcacaagaatcctgaaaaaggatgccaaactctgctcagttcatccctag

SEQ ID NO: 1653 - RNA, 89 nt, synthetic construct
  source 1..89: mol_type = other RNA
acagcttatttggaagctgaaatgtgaggtttataacactcacaagaatcctgaaaaaggatgccaaacgaagtggctccaagtgcagg

SEQ ID NO: 1654 - RNA, 89 nt, synthetic construct
  source 1..89: mol_type = other RNA
acagcttatttggaagctgaaatgtgaggtttataacactcacaagaatcctgaaaaaggatgccaaacgctggactggacggagatca

SEQ ID NO: 1655 - RNA, 89 nt, synthetic construct
  source 1..89: mol_type = other RNA
acagcttatttggaagctgaaatgtgaggtttataacactcacaagaatcctgaaaaaggatgccaaacgagaagcacttgctagagct

SEQ ID NO: 1656 - RNA, 89 nt, synthetic construct
  source 1..89: mol_type = other RNA
acagcttatttggaagctgaaatgtgaggtttataacactcacaagaatcctgaaaaaggatgccaaacctgccctggagatgatataa

SEQ ID NO: 1657 - RNA, 89 nt, synthetic construct
  source 1..89: mol_type = other RNA
acagcttatttggaagctgaaatgtgaggtttataacactcacaagaatcctgaaaaaggatgccaaacatataaaacaggtcagaacc

SEQ ID NO: 1658 - RNA, 89 nt, synthetic construct
  source 1..89: mol_type = other RNA
acagcttatttggaagctgaaatgtgaggtttataacactcacaagaatcctgaaaaaggatgccaaacgctccaagtgcaggttcccc

SEQ ID NO: 1659 - RNA, 89 nt, synthetic construct
  source 1..89: mol_type = other RNA
acagcttatttggaagctgaaatgtgaggtttataacactcacaagaatcctgaaaaaggatgccaaacggctgggcagggagctcctc

SEQ ID NO: 1660 - RNA, 89 nt, synthetic construct
  source 1..89: mol_type = other RNA
acagcttatttggaagctgaaatgtgaggtttataacactcacaagaatcctgaaaaaggatgccaaacgacataggccaggggcctcg

SEQ ID NO: 1661 - RNA, 89 nt, synthetic construct
  source 1..89: mol_type = other RNA
acagcttatttggaagctgaaatgtgaggtttataacactcacaagaatcctgaaaaaggatgccaaacggcctggggagccctcattc

SEQ ID NO: 1662 - RNA, 89 nt, synthetic construct
  source 1..89: mol_type = other RNA
acagcttatttggaagctgaaatgtgaggtttataacactcacaagaatcctgaaaaaggatgccaaacggctggggggtgtttggagt

SEQ ID NO: 1663 - RNA, 89 nt, synthetic construct
  source 1..89: mol_type = other RNA
acagcttatttggaagctgaaatgtgaggtttataacactcacaagaatcctgaaaaaggatgccaaacggtgggatggagcagaaaac

SEQ ID NO: 1664 - RNA, 89 nt, synthetic construct
  source 1..89: mol_type = other RNA
acagcttatttggaagctgaaatgtgaggtttataacactcacaagaatcctgaaaaaggatgccaaacgcttggacataggccagggg

SEQ ID NO: 1665 - RNA, 89 nt, synthetic construct
  source 1..89: mol_type = other RNA
acagcttatttggaagctgaaatgtgaggtttataacactcacaagaatcctgaaaaaggatgccaaacagggcctgaggcagggtgtc

SEQ ID NO: 1666 - RNA, 89 nt, synthetic construct
  source 1..89: mol_type = other RNA
acagcttatttggaagctgaaatgtgaggtttataacactcacaagaatcctgaaaaaggatgccaaacaggcagggtgtccagatgca

SEQ ID NO: 1667 - RNA, 89 nt, synthetic construct
  source 1..89: mol_type = other RNA
acagcttatttggaagctgaaatgtgaggtttataacactcacaagaatcctgaaaaaggatgccaaactcccgccagccctgcagccc

SEQ ID NO: 1668 - RNA, 89 nt, synthetic construct
  source 1..89: mol_type = other RNA
acagcttatttggaagctgaaatgtgaggtttataacactcacaagaatcctgaaaaaggatgccaaaccccctcttcatcctcctccc

SEQ ID NO: 1669 - RNA, 89 nt, synthetic construct
  source 1..89: mol_type = other RNA
acagcttatttggaagctgaaatgtgaggtttataacactcacaagaatcctgaaaaaggatgccaaacaacatcaaggcacctgcggt

SEQ ID NO: 1670 - RNA, 89 nt, synthetic construct
  source 1..89: mol_type = other RNA
acagcttatttggaagctgaaatgtgaggtttataacactcacaagaatcctgaaaaaggatgccaaacagctcaggaactgggggtgg

SEQ ID NO: 1671 - RNA, 89 nt, synthetic construct
  source 1..89: mol_type = other RNA
acagcttatttggaagctgaaatgtgaggtttataacactcacaagaatcctgaaaaaggatgccaaacttcttcaggttatgatgagg

SEQ ID NO: 1672 - RNA, 89 nt, synthetic construct
  source 1..89: mol_type = other RNA
acagcttatttggaagctgaaatgtgaggtttataacactcacaagaatcctgaaaaaggatgccaaacgctttgggcaagtgacaccc

SEQ ID NO: 1673 - RNA, 89 nt, synthetic construct
  source 1..89: mol_type = other RNA
acagcttatttggaagctgaaatgtgaggtttataacactcacaagaatcctgaaaaaggatgccaaacaggggggaacctgcacttgg

SEQ ID NO: 1674 - RNA, 89 nt, synthetic construct
  source 1..89: mol_type = other RNA
acagcttatttggaagctgaaatgtgaggtttataacactcacaagaatcctgaaaaaggatgccaaacgcttgggctggggggtgttt

SEQ ID NO: 1675 - RNA, 89 nt, synthetic construct
  source 1..89: mol_type = other RNA
acagcttatttggaagctgaaatgtgaggtttataacactcacaagaatcctgaaaaaggatgccaaacaactgagcagacaggcagga

SEQ ID NO: 1676 - RNA, 89 nt, synthetic construct
  source 1..89: mol_type = other RNA
acagcttatttggaagctgaaatgtgaggtttataacactcacaagaatcctgaaaaaggatgccaaactgtgtctttgggtgatttct

SEQ ID NO: 1677 - RNA, 89 nt, synthetic construct
  source 1..89: mol_type = other RNA
acagcttatttggaagctgaaatgtgaggtttataacactcacaagaatcctgaaaaaggatgccaaactgatgaggggtggggggcac

SEQ ID NO: 1678 - RNA, 89 nt, synthetic construct
  source 1..89: mol_type = other RNA
acagcttatttggaagctgaaatgtgaggtttataacactcacaagaatcctgaaaaaggatgccaaacggcagggagctcctcttgcc

SEQ ID NO: 1679 - RNA, 89 nt, synthetic construct
  source 1..89: mol_type = other RNA
acagcttatttggaagctgaaatgtgaggtttataacactcacaagaatcctgaaaaaggatgccaaacaggggtggggggcacccgtc

SEQ ID NO: 1680 - RNA, 89 nt, synthetic construct; identical to SEQ ID NO: 556
  source 1..89: mol_type = other RNA

SEQ ID NO: 1681 - RNA, 89 nt, synthetic construct
  source 1..89: mol_type = other RNA
acagcttatttggaagctgaaatgtgaggtttataacactcacaagaatcctgaaaaaggatgccaaacgggatgaactgagcagacag

SEQ ID NO: 1682 - RNA, 89 nt, synthetic construct
  source 1..89: mol_type = other RNA
acagcttatttggaagctgaaatgtgaggtttataacactcacaagaatcctgaaaaaggatgccaaacaggcttcctccagccctaag

SEQ ID NO: 1683 - RNA, 89 nt, synthetic construct
  source 1..89: mol_type = other RNA
acagcttatttggaagctgaaatgtgaggtttataacactcacaagaatcctgaaaaaggatgccaaacgagatgagggcctgaggcag

SEQ ID NO: 1684 - RNA, 89 nt, synthetic construct
  source 1..89: mol_type = other RNA
acagcttatttggaagctgaaatgtgaggtttataacactcacaagaatcctgaaaaaggatgccaaacggatggagcagaaaacccac

SEQ ID NO: 1685 - RNA, 89 nt, synthetic construct
  source 1..89: mol_type = other RNA
acagcttatttggaagctgaaatgtgaggtttataacactcacaagaatcctgaaaaaggatgccaaacaagaatgaggggggaacctg

SEQ ID NO: 1686 - RNA, 89 nt, synthetic construct
  source 1..89: mol_type = other RNA
acagcttatttggaagctgaaatgtgaggtttataacactcacaagaatcctgaaaaaggatgccaaactttggagtaaaggcacagaa

SEQ ID NO: 1687 - RNA, 89 nt, synthetic construct
  source 1..89: mol_type = other RNA
acagcttatttggaagctgaaatgtgaggtttataacactcacaagaatcctgaaaaaggatgccaaacgagtagaggggtgaggggct

SEQ ID NO: 1688 - RNA, 89 nt, synthetic construct
  source 1..89: mol_type = other RNA
acagcttatttggaagctgaaatgtgaggtttataacactcacaagaatcctgaaaaaggatgccaaacacctgttttatatcatctcc

SEQ ID NO: 1689 - RNA, 89 nt, synthetic construct
  source 1..89: mol_type = other RNA
acagcttatttggaagctgaaatgtgaggtttataacactcacaagaatcctgaaaaaggatgccaaacgtgagaggggaaatggcttg

SEQ ID NO: 1690 - RNA, 89 nt, synthetic construct
  source 1..89: mol_type = other RNA
acagcttatttggaagctgaaatgtgaggtttataacactcacaagaatcctgaaaaaggatgccaaactgtagctttgggcaagtgac

SEQ ID NO: 1691 - RNA, 89 nt, synthetic construct
  source 1..89: mol_type = other RNA
acagcttatttggaagctgaaatgtgaggtttataacactcacaagaatcctgaaaaaggatgccaaactgtctttgggtgatttctgg

SEQ ID NO: 1692 - RNA, 89 nt, synthetic construct
  source 1..89: mol_type = other RNA
acagcttatttggaagctgaaatgtgaggtttataacactcacaagaatcctgaaaaaggatgccaaactatcatctccagggcagcag

SEQ ID NO: 1693 - RNA, 89 nt, synthetic construct
  source 1..89: mol_type = other RNA
acagcttatttggaagctgaaatgtgaggtttataacactcacaagaatcctgaaaaaggatgccaaacgagcagaaaacccaccagac

SEQ ID NO: 1694 - RNA, 89 nt, synthetic construct
  source 1..89: mol_type = other RNA
acagcttatttggaagctgaaatgtgaggtttataacactcacaagaatcctgaaaaaggatgccaaacggagactgagtccacgctgc

SEQ ID NO: 1695 - RNA, 89 nt, synthetic construct
  source 1..89: mol_type = other RNA
acagcttatttggaagctgaaatgtgaggtttataacactcacaagaatcctgaaaaaggatgccaaaccagcccagatgagctcagga

SEQ ID NO: 1696 - RNA, 89 nt, synthetic construct
  source 1..89: mol_type = other RNA
acagcttatttggaagctgaaatgtgaggtttataacactcacaagaatcctgaaaaaggatgccaaacggtggcttgggctggggggt

SEQ ID NO: 1697 - RNA, 89 nt, synthetic construct
  source 1..89: mol_type = other RNA
acagcttatttggaagctgaaatgtgaggtttataacactcacaagaatcctgaaaaaggatgccaaacaggggcttcttcagacttga

SEQ ID NO: 1698 - RNA, 89 nt, synthetic construct
  source 1..89: mol_type = other RNA
acagcttatttggaagctgaaatgtgaggtttataacactcacaagaatcctgaaaaaggatgccaaaccacttggagccacttccagc

SEQ ID NO: 1699 - RNA, 89 nt, synthetic construct
  source 1..89: mol_type = other RNA
acagcttatttggaagctgaaatgtgaggtttataacactcacaagaatcctgaaaaaggatgccaaaccagcaagcgggcgggagagt

SEQ ID NO: 1700 - RNA, 89 nt, synthetic construct
  source 1..89: mol_type = other RNA
acagcttatttggaagctgaaatgtgaggtttataacactcacaagaatcctgaaaaaggatgccaaacggcaaaggtcacctgctgac

SEQ ID NO: 1701 - RNA, 89 nt, synthetic construct
  source 1..89: mol_type = other RNA
acagcttatttggaagctgaaatgtgaggtttataacactcacaagaatcctgaaaaaggatgccaaactctttgggtgatttctggcc

SEQ ID NO: 1702 - RNA, 89 nt, synthetic construct
  source 1..89: mol_type = other RNA
acagcttatttggaagctgaaatgtgaggtttataacactcacaagaatcctgaaaaaggatgccaaactcatctccagggcagcaggc

SEQ ID NO: 1703 - RNA, 89 nt, synthetic construct
  source 1..89: mol_type = other RNA
acagcttatttggaagctgaaatgtgaggtttataacactcacaagaatcctgaaaaaggatgccaaacagcagacaggcaggagggtt

SEQ ID NO: 1704 - RNA, 89 nt, synthetic construct
  source 1..89: mol_type = other RNA
acagcttatttggaagctgaaatgtgaggtttataacactcacaagaatcctgaaaaaggatgccaaacaggacccagggcgctgggca

SEQ ID NO: 1705 - RNA, 89 nt, synthetic construct
  source 1..89: mol_type = other RNA
acagcttatttggaagctgaaatgtgaggtttataacactcacaagaatcctgaaaaaggatgccaaacgggggtgtttggagtaaagg

SEQ ID NO: 1706 - RNA, 89 nt, synthetic construct
  source 1..89: mol_type = other RNA
acagcttatttggaagctgaaatgtgaggtttataacactcacaagaatcctgaaaaaggatgccaaacgggtaggactgggctgtcta

SEQ ID NO: 1707 - RNA, 89 nt, synthetic construct
  source 1..89: mol_type = other RNA
acagcttatttggaagctgaaatgtgaggtttataacactcacaagaatcctgaaaaaggatgccaaacggtgatttctggccctctcc

SEQ ID NO: 1708 - RNA, 89 nt, synthetic construct; identical to SEQ ID NO: 555
  source 1..89: mol_type = other RNA

SEQ ID NO: 1709 - RNA, 89 nt, synthetic construct
  source 1..89: mol_type = other RNA
acagcttatttggaagctgaaatgtgaggtttataacactcacaagaatcctgaaaaaggatgccaaacctgtgtgtctttgggtgatt

SEQ ID NO: 1710 - RNA, 89 nt, synthetic construct
  source 1..89: mol_type = other RNA
acagcttatttggaagctgaaatgtgaggtttataacactcacaagaatcctgaaaaaggatgccaaacctgaccagtggagatgaggg

SEQ ID NO: 1711 - RNA, 89 nt, synthetic construct
  source 1..89: mol_type = other RNA
acagcttatttggaagctgaaatgtgaggtttataacactcacaagaatcctgaaaaaggatgccaaacatgaggggtggggggcaccc

SEQ ID NO: 1712 - RNA, 89 nt, synthetic construct
  source 1..89: mol_type = other RNA
acagcttatttggaagctgaaatgtgaggtttataacactcacaagaatcctgaaaaaggatgccaaactctaaggcttcctccagccc

SEQ ID NO: 1713 - RNA, 89 nt, synthetic construct
  source 1..89: mol_type = other RNA
acagcttatttggaagctgaaatgtgaggtttataacactcacaagaatcctgaaaaaggatgccaaacgaatttcaggcccctccctc

SEQ ID NO: 1714 - RNA, 89 nt, synthetic construct
  source 1..89: mol_type = other RNA
acagcttatttggaagctgaaatgtgaggtttataacactcacaagaatcctgaaaaaggatgccaaacagcctgaagaatgagggggg

SEQ ID NO: 1715 - RNA, 89 nt, synthetic construct
  source 1..89: mol_type = other RNA
acagcttatttggaagctgaaatgtgaggtttataacactcacaagaatcctgaaaaaggatgccaaacgggggcacccgtccagctcc

SEQ ID NO: 1716 - RNA, 89 nt, synthetic construct
  source 1..89: mol_type = other RNA
acagcttatttggaagctgaaatgtgaggtttataacactcacaagaatcctgaaaaaggatgccaaacaaggcacagaagaccaggca

SEQ ID NO: 1717 - RNA, 89 nt, synthetic construct
  source 1..89: mol_type = other RNA
acagcttatttggaagctgaaatgtgaggtttataacactcacaagaatcctgaaaaaggatgccaaacaccagtggagatgagggcct

SEQ ID NO: 1718 - RNA, 89 nt, synthetic construct
  source 1..89: mol_type = other RNA
acagcttatttggaagctgaaatgtgaggtttataacactcacaagaatcctgaaaaaggatgccaaacggctgtctaaggcttcctcc

SEQ ID NO: 1719 - RNA, 89 nt, synthetic construct
  source 1..89: mol_type = other RNA
acagcttatttggaagctgaaatgtgaggtttataacactcacaagaatcctgaaaaaggatgccaaacggggtgggcctggggagccc

SEQ ID NO: 1720 - RNA, 89 nt, synthetic construct
  source 1..89: mol_type = other RNA
acagcttatttggaagctgaaatgtgaggtttataacactcacaagaatcctgaaaaaggatgccaaactagctttgggcaagtgacac

SEQ ID NO: 1721 - RNA, 89 nt, synthetic construct
  source 1..89: mol_type = other RNA
acagcttatttggaagctgaaatgtgaggtttataacactcacaagaatcctgaaaaaggatgccaaacgagccacttccagccccacc

SEQ ID NO: 1722 - RNA, 89 nt, synthetic construct
  source 1..89: mol_type = other RNA
acagcttatttggaagctgaaatgtgaggtttataacactcacaagaatcctgaaaaaggatgccaaacatttctggccctctccaggc

SEQ ID NO: 1723 - RNA, 89 nt, synthetic construct
  source 1..89: mol_type = other RNA
acagcttatttggaagctgaaatgtgaggtttataacactcacaagaatcctgaaaaaggatgccaaacactggctccccagggagagg

SEQ ID NO: 1724 - RNA, 89 nt, synthetic construct
  source 1..89: mol_type = other RNA
acagcttatttggaagctgaaatgtgaggtttataacactcacaagaatcctgaaaaaggatgccaaacgccctctccaggcctcagtt

SEQ ID NO: 1725 - RNA, 89 nt, synthetic construct
  source 1..89: mol_type = other RNA
acagcttatttggaagctgaaatgtgaggtttataacactcacaagaatcctgaaaaaggatgccaaacggactgggctgtctaaggct

SEQ ID NO: 1726 - RNA, 89 nt, synthetic construct
  source 1..89: mol_type = other RNA
acagcttatttggaagctgaaatgtgaggtttataacactcacaagaatcctgaaaaaggatgccaaacctgtcccgccagccctgcag

SEQ ID NO: 1727 - RNA, 89 nt, synthetic construct
  source 1..89: mol_type = other RNA
acagcttatttggaagctgaaatgtgaggtttataacactcacaagaatcctgaaaaaggatgccaaacggcaagtgacacccctcccg

SEQ ID NO: 1728 - RNA, 89 nt, synthetic construct
  source 1..89: mol_type = other RNA
acagcttatttggaagctgaaatgtgaggtttataacactcacaagaatcctgaaaaaggatgccaaacagaacaagtgggtggcttgg

SEQ ID NO: 1729 - RNA, 89 nt, synthetic construct
  source 1..89: mol_type = other RNA
acagcttatttggaagctgaaatgtgaggtttataacactcacaagaatcctgaaaaaggatgccaaacaacacagcctggagtagagg

SEQ ID NO: 1730 - RNA, 89 nt, synthetic construct
  source 1..89: mol_type = other RNA
acagcttatttggaagctgaaatgtgaggtttataacactcacaagaatcctgaaaaaggatgccaaactctggggtaggactgggctg

SEQ ID NO: 1731 - RNA, 89 nt, synthetic construct
  source 1..89: mol_type = other RNA
acagcttatttggaagctgaaatgtgaggtttataacactcacaagaatcctgaaaaaggatgccaaacgaggggtgaggggcttcttc

SEQ ID NO: 1732 - RNA, 89 nt, synthetic construct
  source 1..89: mol_type = other RNA
acagcttatttggaagctgaaatgtgaggtttataacactcacaagaatcctgaaaaaggatgccaaaccggtctggactgatctccgt

SEQ ID NO: 1733 - RNA, 89 nt, synthetic construct
  source 1..89: mol_type = other RNA
acagcttatttggaagctgaaatgtgaggtttataacactcacaagaatcctgaaaaaggatgccaaacgctgggctgggcagggagct

SEQ ID NO: 1734 - RNA, 89 nt, synthetic construct
  source 1..89: mol_type = other RNA
acagcttatttggaagctgaaatgtgaggtttataacactcacaagaatcctgaaaaaggatgccaaacgggagccctcattccttcct

SEQ ID NO: 1735 - RNA, 89 nt, synthetic construct
  source 1..89: mol_type = other RNA
acagcttatttggaagctgaaatgtgaggtttataacactcacaagaatcctgaaaaaggatgccaaacgagtaaaggcacagaagacc

SEQ ID NO: 1736 - RNA, 89 nt, synthetic construct
  source 1..89: mol_type = other RNA
acagcttatttggaagctgaaatgtgaggtttataacactcacaagaatcctgaaaaaggatgccaaacgcaagtgcttctccaggctt

SEQ ID NO: 1737 - RNA, 89 nt, synthetic construct
  source 1..89: mol_type = other RNA
acagcttatttggaagctgaaatgtgaggtttataacactcacaagaatcctgaaaaaggatgccaaacagaggggaaatggcttggac

SEQ ID NO: 1738 - RNA, 89 nt, synthetic construct
  source 1..89: mol_type = other RNA
acagcttatttggaagctgaaatgtgaggtttataacactcacaagaatcctgaaaaaggatgccaaacagtccacgctgctgtcccgc

SEQ ID NO: 1739 - RNA, 89 nt, synthetic construct
  source 1..89: mol_type = other RNA
acagcttatttggaagctgaaatgtgaggtttataacactcacaagaatcctgaaaaaggatgccaaaccctctagggatgaactgagc

SEQ ID NO: 1740 - RNA, 89 nt, synthetic construct
  source 1..89: mol_type = other RNA
acagcttatttggaagctgaaatgtgaggtttataacactcacaagaatcctgaaaaaggatgccaaacggccaggggcctcgggccca

SEQ ID NO: 1741 - RNA, 89 nt, synthetic construct
  source 1..89: mol_type = other RNA
acagcttatttggaagctgaaatgtgaggtttataacactcacaagaatcctgaaaaaggatgccaaacctggctgggctgggcaggga

SEQ ID NO: 1742 - RNA, 89 nt, synthetic construct
  source 1..89: mol_type = other RNA
acagcttatttggaagctgaaatgtgaggtttataacactcacaagaatcctgaaaaaggatgccaaacatctccgtccagtccagcca

SEQ ID NO: 1743 - RNA, 89 nt, synthetic construct
  source 1..89: mol_type = other RNA
acagcttatttggaagctgaaatgtgaggtttataacactcacaagaatcctgaaaaaggatgccaaacgactgatctccgtccagtcc

SEQ ID NO: 1744 - RNA, 89 nt, synthetic construct
  source 1..89: mol_type = other RNA
acagcttatttggaagctgaaatgtgaggtttataacactcacaagaatcctgaaaaaggatgccaaacggaaatccctaggagactga

SEQ ID NO: 1745 - RNA, 89 nt, synthetic construct
  source 1..89: mol_type = other RNA
acagcttatttggaagctgaaatgtgaggtttataacactcacaagaatcctgaaaaaggatgccaaacgctgactggctccccaggga

SEQ ID NO: 1746 - RNA, 89 nt, synthetic construct
  source 1..89: mol_type = other RNA
acagcttatttggaagctgaaatgtgaggtttataacactcacaagaatcctgaaaaaggatgccaaacacacccctcccgggcctcca

SEQ ID NO: 1747 - RNA, 89 nt, synthetic construct
  source 1..89: mol_type = other RNA
acagcttatttggaagctgaaatgtgaggtttataacactcacaagaatcctgaaaaaggatgccaaacgctctagcaagtgcttctcc

SEQ ID NO: 1748 - RNA, 89 nt, synthetic construct
  source 1..89: mol_type = other RNA
acagcttatttggaagctgaaatgtgaggtttataacactcacaagaatcctgaaaaaggatgccaaaccttctccaggcttgctggct

SEQ ID NO: 1749 - RNA, 89 nt, synthetic construct
  source 1..89: mol_type = other RNA
acagcttatttggaagctgaaatgtgaggtttataacactcacaagaatcctgaaaaaggatgccaaacttttatatcatctccagggc

SEQ ID NO: 1750 - RNA, 89 nt, synthetic construct
  source 1..89: mol_type = other RNA
acagcttatttggaagctgaaatgtgaggtttataacactcacaagaatcctgaaaaaggatgccaaactccagatgcagcaagcgggc

SEQ ID NO: 1751 - RNA, 89 nt, synthetic construct
  source 1..89: mol_type = other RNA
acagcttatttggaagctgaaatgtgaggtttataacactcacaagaatcctgaaaaaggatgccaaacgctccccagggagaggctgg

SEQ ID NO: 1752 - RNA, 89 nt, synthetic construct
  source 1..89: mol_type = other RNA
acagcttatttggaagctgaaatgtgaggtttataacactcacaagaatcctgaaaaaggatgccaaacacaggctccttcacagaagc

SEQ ID NO: 1753 - RNA, 89 nt, synthetic construct
  source 1..89: mol_type = other RNA
acagcttatttggaagctgaaatgtgaggtttataacactcacaagaatcctgaaaaaggatgccaaacctctgcagaacgggacatct

SEQ ID NO: 1754 - RNA, 89 nt, synthetic construct
  source 1..89: mol_type = other RNA
acagcttatttggaagctgaaatgtgaggtttataacactcacaagaatcctgaaaaaggatgccaaacgccccccccacaccaggaac

SEQ ID NO: 1755 - RNA, 89 nt, synthetic construct
  source 1..89: mol_type = other RNA
acagcttatttggaagctgaaatgtgaggtttataacactcacaagaatcctgaaaaaggatgccaaacatatgctgagaaacaatagg

SEQ ID NO: 1756 - RNA, 89 nt, synthetic construct
  source 1..89: mol_type = other RNA
acagcttatttggaagctgaaatgtgaggtttataacactcacaagaatcctgaaaaaggatgccaaacggcagggattagtgagagaa

SEQ ID NO: 1757 - RNA, 89 nt, synthetic construct
  source 1..89: mol_type = other RNA
acagcttatttggaagctgaaatgtgaggtttataacactcacaagaatcctgaaaaaggatgccaaacgacctcaggcctgctttaca

SEQ ID NO: 1758 - RNA, 89 nt, synthetic construct
  source 1..89: mol_type = other RNA
acagcttatttggaagctgaaatgtgaggtttataacactcacaagaatcctgaaaaaggatgccaaaccagaacgggacatctactct

SEQ ID NO: 1759 - RNA, 89 nt, synthetic construct
  source 1..89: mol_type = other RNA
acagcttatttggaagctgaaatgtgaggtttataacactcacaagaatcctgaaaaaggatgccaaacgagtagctagctgcttctag

SEQ ID NO: 1760 - RNA, 89 nt, synthetic construct
  source 1..89: mol_type = other RNA
acagcttatttggaagctgaaatgtgaggtttataacactcacaagaatcctgaaaaaggatgccaaacgtgccactgtggagcaacgg

SEQ ID NO: 1761 - RNA, 89 nt, synthetic construct
  source 1..89: mol_type = other RNA
acagcttatttggaagctgaaatgtgaggtttataacactcacaagaatcctgaaaaaggatgccaaacgggaatctgtggtgccactg

SEQ ID NO: 1762 - RNA, 89 nt, synthetic construct
  source 1..89: mol_type = other RNA
acagcttatttggaagctgaaatgtgaggtttataacactcacaagaatcctgaaaaaggatgccaaacgtgagagcttctccctccag

SEQ ID NO: 1763 - RNA, 89 nt, synthetic construct
  source 1..89: mol_type = other RNA
acagcttatttggaagctgaaatgtgaggtttataacactcacaagaatcctgaaaaaggatgccaaacgctccaggatgggacagcgg

SEQ ID NO: 1764 - RNA, 89 nt, synthetic construct
  source 1..89: mol_type = other RNA
acagcttatttggaagctgaaatgtgaggtttataacactcacaagaatcctgaaaaaggatgccaaacctgagaaacaataggtttct

SEQ ID NO: 1765 - RNA, 89 nt, synthetic construct
  source 1..89: mol_type = other RNA
acagcttatttggaagctgaaatgtgaggtttataacactcacaagaatcctgaaaaaggatgccaaacacctgttttatattggctcc

SEQ ID NO: 1766 - RNA, 89 nt, synthetic construct
  source 1..89: mol_type = other RNA
acagcttatttggaagctgaaatgtgaggtttataacactcacaagaatcctgaaaaaggatgccaaacagattgcccatgcttttcac

SEQ ID NO: 1767 - RNA, 89 nt, synthetic construct
  source 1..89: mol_type = other RNA
acagcttatttggaagctgaaatgtgaggtttataacactcacaagaatcctgaaaaaggatgccaaacgggtggaaggtggagtatag

SEQ ID NO: 1768 - RNA, 89 nt, synthetic construct
  source 1..89: mol_type = other RNA
acagcttatttggaagctgaaatgtgaggtttataacactcacaagaatcctgaaaaaggatgccaaacccaaaggcttctaatagctc

SEQ ID NO: 1769 - RNA, 89 nt, synthetic construct
  source 1..89: mol_type = other RNA
acagcttatttggaagctgaaatgtgaggtttataacactcacaagaatcctgaaaaaggatgccaaacagacaggaaaagacagggga

SEQ ID NO: 1770 - RNA, 89 nt, synthetic construct
  source 1..89: mol_type = other RNA
acagcttatttggaagctgaaatgtgaggtttataacactcacaagaatcctgaaaaaggatgccaaacgacccagccccccaagtggg

SEQ ID NO: 1771 - RNA, 89 nt, synthetic construct
  source 1..89: mol_type = other RNA
acagcttatttggaagctgaaatgtgaggtttataacactcacaagaatcctgaaaaaggatgccaaacccgtagctgggcagggatta

SEQ ID NO: 1772 - RNA, 89 nt, synthetic construct
  source 1..89: mol_type = other RNA
acagcttatttggaagctgaaatgtgaggtttataacactcacaagaatcctgaaaaaggatgccaaaccagtagacccagccccccaa

SEQ ID NO: 1773 - RNA, 89 nt, synthetic construct
  source 1..89: mol_type = other RNA
acagcttatttggaagctgaaatgtgaggtttataacactcacaagaatcctgaaaaaggatgccaaacggtggtgagagcttctccct

SEQ ID NO: 1774 - RNA, 89 nt, synthetic construct
  source 1..89: mol_type = other RNA
acagcttatttggaagctgaaatgtgaggtttataacactcacaagaatcctgaaaaaggatgccaaacgaatggaatggggaatctgt

SEQ ID NO: 1775 - RNA, 89 nt, synthetic construct
  source 1..89: mol_type = other RNA
acagcttatttggaagctgaaatgtgaggtttataacactcacaagaatcctgaaaaaggatgccaaacgatggctgggtggtgagagc

SEQ ID NO: 1776 - RNA, 89 nt, synthetic construct
  source 1..89: mol_type = other RNA
acagcttatttggaagctgaaatgtgaggtttataacactcacaagaatcctgaaaaaggatgccaaactggagcaacggaggaagtgg

SEQ ID NO: 1777 - RNA, 89 nt, synthetic construct
  source 1..89: mol_type = other RNA
acagcttatttggaagctgaaatgtgaggtttataacactcacaagaatcctgaaaaaggatgccaaacgcctccctttccccagcttc

SEQ ID NO: 1778 - RNA, 89 nt, synthetic construct
  source 1..89: mol_type = other RNA
acagcttatttggaagctgaaatgtgaggtttataacactcacaagaatcctgaaaaaggatgccaaacggtcatgaatcccaagcctt

SEQ ID NO: 1779 - RNA, 89 nt, synthetic construct
  source 1..89: mol_type = other RNA
acagcttatttggaagctgaaatgtgaggtttataacactcacaagaatcctgaaaaaggatgccaaacgctagctgcttctagggata

SEQ ID NO: 1780 - RNA, 89 nt, synthetic construct
  source 1..89: mol_type = other RNA
acagcttatttggaagctgaaatgtgaggtttataacactcacaagaatcctgaaaaaggatgccaaacgcccatagcctccctttccc

SEQ ID NO: 1781 - RNA, 89 nt, synthetic construct
  source 1..89: mol_type = other RNA
acagcttatttggaagctgaaatgtgaggtttataacactcacaagaatcctgaaaaaggatgccaaacgagaccatgagtcccaagcc

SEQ ID NO: 1782 - RNA, 89 nt, synthetic construct
  source 1..89: mol_type = other RNA
acagcttatttggaagctgaaatgtgaggtttataacactcacaagaatcctgaaaaaggatgccaaactgacctgttttatattggct

SEQ ID NO: 1783 - RNA, 89 nt, synthetic construct
  source 1..89: mol_type = other RNA
acagcttatttggaagctgaaatgtgaggtttataacactcacaagaatcctgaaaaaggatgccaaacctctaatatgctgagaaaca

SEQ ID NO: 1784 - RNA, 89 nt, synthetic construct
  source 1..89: mol_type = other RNA
acagcttatttggaagctgaaatgtgaggtttataacactcacaagaatcctgaaaaaggatgccaaacccactgtggagcaacggagg

SEQ ID NO: 1785 - RNA, 89 nt, synthetic construct
  source 1..89: mol_type = other RNA
acagcttatttggaagctgaaatgtgaggtttataacactcacaagaatcctgaaaaaggatgccaaacacctccacctgtgatcccaa

SEQ ID NO: 1786 - RNA, 89 nt, synthetic construct
  source 1..89: mol_type = other RNA
acagcttatttggaagctgaaatgtgaggtttataacactcacaagaatcctgaaaaaggatgccaaacctttacagcctagagccagt

SEQ ID NO: 1787 - RNA, 89 nt, synthetic construct
  source 1..89: mol_type = other RNA
acagcttatttggaagctgaaatgtgaggtttataacactcacaagaatcctgaaaaaggatgccaaacctgagcagtccagaccagag

SEQ ID NO: 1788 - RNA, 89 nt, synthetic construct
  source 1..89: mol_type = other RNA
acagcttatttggaagctgaaatgtgaggtttataacactcacaagaatcctgaaaaaggatgccaaacaggcaggaaggccatgcagc

SEQ ID NO: 1789 - RNA, 89 nt, synthetic construct
  source 1..89: mol_type = other RNA
acagcttatttggaagctgaaatgtgaggtttataacactcacaagaatcctgaaaaaggatgccaaacttggctccaggatgggacag

SEQ ID NO: 1790 - RNA, 89 nt, synthetic construct
  source 1..89: mol_type = other RNA
acagcttatttggaagctgaaatgtgaggtttataacactcacaagaatcctgaaaaaggatgccaaacaaagccttccagtagaatgg

SEQ ID NO: 1791 - RNA, 89 nt, synthetic construct
  source 1..89: mol_type = other RNA
acagcttatttggaagctgaaatgtgaggtttataacactcacaagaatcctgaaaaaggatgccaaacatattagatagagaactaca

SEQ ID NO: 1792 - RNA, 89 nt, synthetic construct
  source 1..89: mol_type = other RNA
acagcttatttggaagctgaaatgtgaggtttataacactcacaagaatcctgaaaaaggatgccaaaccccagtgcaaggcttttggc

SEQ ID NO: 1793 - RNA, 89 nt, synthetic construct
  source 1..89: mol_type = other RNA
acagcttatttggaagctgaaatgtgaggtttataacactcacaagaatcctgaaaaaggatgccaaactagaaatactctgcagaacg

SEQ ID NO: 1794 - RNA, 89 nt, synthetic construct
  source 1..89: mol_type = other RNA
acagcttatttggaagctgaaatgtgaggtttataacactcacaagaatcctgaaaaaggatgccaaacaatcccaagcctttctccca

SEQ ID NO: 1795 - RNA, 89 nt, synthetic construct
  source 1..89: mol_type = other RNA
acagcttatttggaagctgaaatgtgaggtttataacactcacaagaatcctgaaaaaggatgccaaacgataccaaaggcttctaata

SEQ ID NO: 1796 - RNA, 89 nt, synthetic construct
  source 1..89: mol_type = other RNA
acagcttatttggaagctgaaatgtgaggtttataacactcacaagaatcctgaaaaaggatgccaaacaaactgagcaggcaagcggg

SEQ ID NO: 1797 - RNA, 89 nt, synthetic construct
  source 1..89: mol_type = other RNA
acagcttatttggaagctgaaatgtgaggtttataacactcacaagaatcctgaaaaaggatgccaaaccttttcacggccacctccgc

SEQ ID NO: 1798 - RNA, 89 nt, synthetic construct
  source 1..89: mol_type = other RNA
acagcttatttggaagctgaaatgtgaggtttataacactcacaagaatcctgaaaaaggatgccaaacagaaatccctctgagattgc

SEQ ID NO: 1799 - RNA, 89 nt, synthetic construct
  source 1..89: mol_type = other RNA
acagcttatttggaagctgaaatgtgaggtttataacactcacaagaatcctgaaaaaggatgccaaacgagtatagaaatactctgca

SEQ ID NO: 1800 - RNA, 89 nt, synthetic construct
  source 1..89: mol_type = other RNA
acagcttatttggaagctgaaatgtgaggtttataacactcacaagaatcctgaaaaaggatgccaaacaaggttacatgcccccacac

SEQ ID NO: 1801 - RNA, 89 nt, synthetic construct
  source 1..89: mol_type = other RNA
acagcttatttggaagctgaaatgtgaggtttataacactcacaagaatcctgaaaaaggatgccaaactttcttcccttccttcctct

SEQ ID NO: 1802 - RNA, 89 nt, synthetic construct
  source 1..89: mol_type = other RNA
acagcttatttggaagctgaaatgtgaggtttataacactcacaagaatcctgaaaaaggatgccaaacttttatattggctccaggat

SEQ ID NO: 1803 - RNA, 89 nt, synthetic construct
  source 1..89: mol_type = other RNA
acagcttatttggaagctgaaatgtgaggtttataacactcacaagaatcctgaaaaaggatgccaaacgagccagtgacaggctcctt

SEQ ID NO: 1804 - RNA, 89 nt, synthetic construct
  source 1..89: mol_type = other RNA
acagcttatttggaagctgaaatgtgaggtttataacactcacaagaatcctgaaaaaggatgccaaacgaaggtggagtatagaaata

SEQ ID NO: 1805 - RNA, 89 nt, synthetic construct
  source 1..89: mol_type = other RNA
acagcttatttggaagctgaaatgtgaggtttataacactcacaagaatcctgaaaaaggatgccaaacccactacccagtgcaaggct

SEQ ID NO: 1806 - RNA, 89 nt, synthetic construct
  source 1..89: mol_type = other RNA
acagcttatttggaagctgaaatgtgaggtttataacactcacaagaatcctgaaaaaggatgccaaacggtttcttttcctcgctagg

SEQ ID NO: 1807 - RNA, 89 nt, synthetic construct
  source 1..89: mol_type = other RNA
acagcttatttggaagctgaaatgtgaggtttataacactcacaagaatcctgaaaaaggatgccaaacaggtcggtgagacaggaaaa

SEQ ID NO: 1808 - RNA, 89 nt, synthetic construct
  source 1..89: mol_type = other RNA
acagcttatttggaagctgaaatgtgaggtttataacactcacaagaatcctgaaaaaggatgccaaacgagaactacagtagacccag

SEQ ID NO: 1809 - RNA, 89 nt, synthetic construct
  source 1..89: mol_type = other RNA
acagcttatttggaagctgaaatgtgaggtttataacactcacaagaatcctgaaaaaggatgccaaacagctgggcaaaggtcacctg

SEQ ID NO: 1810 - RNA, 89 nt, synthetic construct
  source 1..89: mol_type = other RNA
acagcttatttggaagctgaaatgtgaggtttataacactcacaagaatcctgaaaaaggatgccaaacttagatagagaactacagta

SEQ ID NO: 1811 - RNA, 89 nt, synthetic construct
  source 1..89: mol_type = other RNA
acagcttatttggaagctgaaatgtgaggtttataacactcacaagaatcctgaaaaaggatgccaaaccaggcagctctgccactacc

SEQ ID NO: 1812 - RNA, 89 nt, synthetic construct
  source 1..89: mol_type = other RNA
acagcttatttggaagctgaaatgtgaggtttataacactcacaagaatcctgaaaaaggatgccaaaccaaggcttttggcccatagc

SEQ ID NO: 1813 - RNA, 89 nt, synthetic construct
  source 1..89: mol_type = other RNA
acagcttatttggaagctgaaatgtgaggtttataacactcacaagaatcctgaaaaaggatgccaaacagagcttctccctccagctc

SEQ ID NO: 1814 - RNA, 89 nt, synthetic construct
  source 1..89: mol_type = other RNA
acagcttatttggaagctgaaatgtgaggtttataacactcacaagaatcctgaaaaaggatgccaaacggtaggcatggataccaaag

SEQ ID NO: 1815 - RNA, 89 nt, synthetic construct
  source 1..89: mol_type = other RNA
acagcttatttggaagctgaaatgtgaggtttataacactcacaagaatcctgaaaaaggatgccaaacagaaacaataggtttctttt

SEQ ID NO: 1816 - RNA, 89 nt, synthetic construct
  source 1..89: mol_type = other RNA
acagcttatttggaagctgaaatgtgaggtttataacactcacaagaatcctgaaaaaggatgccaaacgggtgggagggggcagagtg

SEQ ID NO: 1817 - RNA, 89 nt, synthetic construct
  source 1..89: mol_type = other RNA
acagcttatttggaagctgaaatgtgaggtttataacactcacaagaatcctgaaaaaggatgccaaactgctgagaaacaataggttt

SEQ ID NO: 1818 - RNA, 89 nt, synthetic construct
  source 1..89: mol_type = other RNA
acagcttatttggaagctgaaatgtgaggtttataacactcacaagaatcctgaaaaaggatgccaaacgctgggcagggattagtgag

SEQ ID NO: 1819 - RNA, 89 nt, synthetic construct
  source 1..89: mol_type = other RNA
acagcttatttggaagctgaaatgtgaggtttataacactcacaagaatcctgaaaaaggatgccaaacaacaagggacagcatgaccc

SEQ ID NO: 1820 - RNA, 89 nt, synthetic construct
  source 1..89: mol_type = other RNA
acagcttatttggaagctgaaatgtgaggtttataacactcacaagaatcctgaaaaaggatgccaaacgagcaacggaggaagtgggg

SEQ ID NO: 1821 - RNA, 89 nt, synthetic construct
  source 1..89: mol_type = other RNA
acagcttatttggaagctgaaatgtgaggtttataacactcacaagaatcctgaaaaaggatgccaaacccggctcacctagatgaggt

SEQ ID NO: 1822 - RNA, 89 nt, synthetic construct
  source 1..89: mol_type = other RNA
acagcttatttggaagctgaaatgtgaggtttataacactcacaagaatcctgaaaaaggatgccaaacggactcagttttttcagtcc

SEQ ID NO: 1823 - RNA, 89 nt, synthetic construct
  source 1..89: mol_type = other RNA
acagcttatttggaagctgaaatgtgaggtttataacactcacaagaatcctgaaaaaggatgccaaacgaaatactctgcagaacggg

SEQ ID NO: 1824 - RNA, 89 nt, synthetic construct
  source 1..89: mol_type = other RNA
acagcttatttggaagctgaaatgtgaggtttataacactcacaagaatcctgaaaaaggatgccaaacggctagatggctgggtggtg

SEQ ID NO: 1825 - RNA, 89 nt, synthetic construct
  source 1..89: mol_type = other RNA
acagcttatttggaagctgaaatgtgaggtttataacactcacaagaatcctgaaaaaggatgccaaacggagggggcagagtgaaggt

SEQ ID NO: 1826 - RNA, 89 nt, synthetic construct
  source 1..89: mol_type = other RNA
acagcttatttggaagctgaaatgtgaggtttataacactcacaagaatcctgaaaaaggatgccaaacgctgcttctagggataaaac

SEQ ID NO: 1827 - RNA, 89 nt, synthetic construct
  source 1..89: mol_type = other RNA
acagcttatttggaagctgaaatgtgaggtttataacactcacaagaatcctgaaaaaggatgccaaaccctggagtagctagctgctt

SEQ ID NO: 1828 - RNA, 89 nt, synthetic construct
  source 1..89: mol_type = other RNA
acagcttatttggaagctgaaatgtgaggtttataacactcacaagaatcctgaaaaaggatgccaaacccagaggagttgagaaatcc

SEQ ID NO: 1829 - RNA, 89 nt, synthetic construct
  source 1..89: mol_type = other RNA
acagcttatttggaagctgaaatgtgaggtttataacactcacaagaatcctgaaaaaggatgccaaaccagccatctgccagaggagt

SEQ ID NO: 1830 - RNA, 89 nt, synthetic construct
  source 1..89: mol_type = other RNA
acagcttatttggaagctgaaatgtgaggtttataacactcacaagaatcctgaaaaaggatgccaaaccccccacactgacctccacc

SEQ ID NO: 1831 - RNA, 89 nt, synthetic construct
  source 1..89: mol_type = other RNA
acagcttatttggaagctgaaatgtgaggtttataacactcacaagaatcctgaaaaaggatgccaaacgatagagaactacagtagac

SEQ ID NO: 1832 - RNA, 89 nt, synthetic construct
  source 1..89: mol_type = other RNA
acagcttatttggaagctgaaatgtgaggtttataacactcacaagaatcctgaaaaaggatgccaaaccatgcccccacactgacctc

SEQ ID NO: 1833 - RNA, 89 nt, synthetic construct
  source 1..89: mol_type = other RNA
acagcttatttggaagctgaaatgtgaggtttataacactcacaagaatcctgaaaaaggatgccaaactgatcccaacagtctcctct

SEQ ID NO: 1834 - RNA, 89 nt, synthetic construct
  source 1..89: mol_type = other RNA
acagcttatttggaagctgaaatgtgaggtttataacactcacaagaatcctgaaaaaggatgccaaacatcccaacagtctcctctgc

SEQ ID NO: 1835 - RNA, 89 nt, synthetic construct
  source 1..89: mol_type = other RNA
acagcttatttggaagctgaaatgtgaggtttataacactcacaagaatcctgaaaaaggatgccaaacgaatggggaatctgtggtgc

SEQ ID NO: 1836 - RNA, 89 nt, synthetic construct
  source 1..89: mol_type = other RNA
acagcttatttggaagctgaaatgtgaggtttataacactcacaagaatcctgaaaaaggatgccaaacgctgggtggtgagagcttct

SEQ ID NO: 1837 - RNA, 89 nt, synthetic construct
  source 1..89: mol_type = other RNA
acagcttatttggaagctgaaatgtgaggtttataacactcacaagaatcctgaaaaaggatgccaaacacccaattgcaggcagctct

SEQ ID NO: 1838 - RNA, 89 nt, synthetic construct
  source 1..89: mol_type = other RNA
acagcttatttggaagctgaaatgtgaggtttataacactcacaagaatcctgaaaaaggatgccaaacggacagcgggcacagaaggc

SEQ ID NO: 1839 - RNA, 89 nt, synthetic construct
  source 1..89: mol_type = other RNA
acagcttatttggaagctgaaatgtgaggtttataacactcacaagaatcctgaaaaaggatgccaaacgatgaggtcggtgagacagg

SEQ ID NO: 1840 - RNA, 89 nt, synthetic construct
  source 1..89: mol_type = other RNA
acagcttatttggaagctgaaatgtgaggtttataacactcacaagaatcctgaaaaaggatgccaaactggtgccactgtggagcaac

SEQ ID NO: 1841 - RNA, 89 nt, synthetic construct
  source 1..89: mol_type = other RNA
acagcttatttggaagctgaaatgtgaggtttataacactcacaagaatcctgaaaaaggatgccaaacggcatggataccaaaggctt

SEQ ID NO: 1842 - RNA, 89 nt, synthetic construct
  source 1..89: mol_type = other RNA
acagcttatttggaagctgaaatgtgaggtttataacactcacaagaatcctgaaaaaggatgccaaacagcaggcaagcggggagggc

SEQ ID NO: 1843 - RNA, 89 nt, synthetic construct
  source 1..89: mol_type = other RNA
acagcttatttggaagctgaaatgtgaggtttataacactcacaagaatcctgaaaaaggatgccaaacagtcccaagccttctgtggg

SEQ ID NO: 1844 - RNA, 89 nt, synthetic construct
  source 1..89: mol_type = other RNA
acagcttatttggaagctgaaatgtgaggtttataacactcacaagaatcctgaaaaaggatgccaaacatagctcagagcaagctaaa

SEQ ID NO: 1845 - RNA, 89 nt, synthetic construct
  source 1..89: mol_type = other RNA
acagcttatttggaagctgaaatgtgaggtttataacactcacaagaatcctgaaaaaggatgccaaacgggataaaactgagcaggca

SEQ ID NO: 1846 - RNA, 89 nt, synthetic construct
  source 1..89: mol_type = other RNA
acagcttatttggaagctgaaatgtgaggtttataacactcacaagaatcctgaaaaaggatgccaaacagcagtccagaccagagcct

SEQ ID NO: 1847 - RNA, 89 nt, synthetic construct
  source 1..89: mol_type = other RNA
acagcttatttggaagctgaaatgtgaggtttataacactcacaagaatcctgaaaaaggatgccaaactgggctagatggctgggtgg

SEQ ID NO: 1848 - RNA, 89 nt, synthetic construct
  source 1..89: mol_type = other RNA
acagcttatttggaagctgaaatgtgaggtttataacactcacaagaatcctgaaaaaggatgccaaacgctcagagcaagctaaacaa

SEQ ID NO: 1849 - RNA, 89 nt, synthetic construct
  source 1..89: mol_type = other RNA
acagcttatttggaagctgaaatgtgaggtttataacactcacaagaatcctgaaaaaggatgccaaaccttctagggataaaactgag

SEQ ID NO: 1850 - RNA, 89 nt, synthetic construct
  source 1..89: mol_type = other RNA
acagcttatttggaagctgaaatgtgaggtttataacactcacaagaatcctgaaaaaggatgccaaaccccatgcttttcacggccac

SEQ ID NO: 1851 - RNA, 89 nt, synthetic construct
  source 1..89: mol_type = other RNA
acagcttatttggaagctgaaatgtgaggtttataacactcacaagaatcctgaaaaaggatgccaaactattggctccaggatgggac

SEQ ID NO: 1852 - RNA, 89 nt, synthetic construct
  source 1..89: mol_type = other RNA
acagcttatttggaagctgaaatgtgaggtttataacactcacaagaatcctgaaaaaggatgccaaacggcaaaggtcacctgctgag

SEQ ID NO: 1853 - RNA, 89 nt, synthetic construct
  source 1..89: mol_type = other RNA
acagcttatttggaagctgaaatgtgaggtttataacactcacaagaatcctgaaaaaggatgccaaaccagcctagagccagtgacag

SEQ ID NO: 1854 - RNA, 89 nt, synthetic construct
  source 1..89: mol_type = other RNA
acagcttatttggaagctgaaatgtgaggtttataacactcacaagaatcctgaaaaaggatgccaaacaaaagcatgggcaatctcag

SEQ ID NO: 1855 - RNA, 89 nt, synthetic construct
  source 1..89: mol_type = other RNA
acagcttatttggaagctgaaatgtgaggtttataacactcacaagaatcctgaaaaaggatgccaaacctccaggtaatgcccctggg

SEQ ID NO: 1856 - RNA, 89 nt, synthetic construct
  source 1..89: mol_type = other RNA
acagcttatttggaagctgaaatgtgaggtttataacactcacaagaatcctgaaaaaggatgccaaacgctactccaggtaatgcccc

SEQ ID NO: 1857 - RNA, 89 nt, synthetic construct
  source 1..89: mol_type = other RNA
acagcttatttggaagctgaaatgtgaggtttataacactcacaagaatcctgaaaaaggatgccaaactcccctgtcttttcctgtct

SEQ ID NO: 1858 - RNA, 89 nt, synthetic construct
  source 1..89: mol_type = other RNA
acagcttatttggaagctgaaatgtgaggtttataacactcacaagaatcctgaaaaaggatgccaaactgcccgctgtcccatcctgg

SEQ ID NO: 1859 - RNA, 89 nt, synthetic construct
  source 1..89: mol_type = other RNA
acagcttatttggaagctgaaatgtgaggtttataacactcacaagaatcctgaaaaaggatgccaaacctcagttttatccctagaag

SEQ ID NO: 1860 - RNA, 89 nt, synthetic construct
  source 1..89: mol_type = other RNA
acagcttatttggaagctgaaatgtgaggtttataacactcacaagaatcctgaaaaaggatgccaaaccagagtatttctatactcca

SEQ ID NO: 1861 - RNA, 89 nt, synthetic construct
  source 1..89: mol_type = other RNA
acagcttatttggaagctgaaatgtgaggtttataacactcacaagaatcctgaaaaaggatgccaaacctgtcccttgtttagcttgc

SEQ ID NO: 1862 - RNA, 89 nt, synthetic construct
  source 1..89: mol_type = other RNA
acagcttatttggaagctgaaatgtgaggtttataacactcacaagaatcctgaaaaaggatgccaaacggtgagccggtagctgatcc

SEQ ID NO: 1863 - RNA, 89 nt, synthetic construct
  source 1..89: mol_type = other RNA
acagcttatttggaagctgaaatgtgaggtttataacactcacaagaatcctgaaaaaggatgccaaacctggaaggctttcaggtggc

SEQ ID NO: 1864 - RNA, 89 nt, synthetic construct
  source 1..89: mol_type = other RNA
acagcttatttggaagctgaaatgtgaggtttataacactcacaagaatcctgaaaaaggatgccaaacggccaaaagccttgcactgg

SEQ ID NO: 1865 - RNA, 89 nt, synthetic construct
  source 1..89: mol_type = other RNA
acagcttatttggaagctgaaatgtgaggtttataacactcacaagaatcctgaaaaaggatgccaaaccccctggggaggagaggaag

SEQ ID NO: 1866 - RNA, 89 nt, synthetic construct
  source 1..89: mol_type = other RNA
acagcttatttggaagctgaaatgtgaggtttataacactcacaagaatcctgaaaaaggatgccaaacctgtagttctctatctaata

SEQ ID NO: 1867 - RNA, 89 nt, synthetic construct
  source 1..89: mol_type = other RNA
acagcttatttggaagctgaaatgtgaggtttataacactcacaagaatcctgaaaaaggatgccaaacggtctactgtagttctctat

SEQ ID NO: 1868 - RNA, 89 nt, synthetic construct
  source 1..89: mol_type = other RNA
acagcttatttggaagctgaaatgtgaggtttataacactcacaagaatcctgaaaaaggatgccaaactctaatatcagtgggagaaa

SEQ ID NO: 1869 - RNA, 89 nt, synthetic construct
  source 1..89: mol_type = other RNA
acagcttatttggaagctgaaatgtgaggtttataacactcacaagaatcctgaaaaaggatgccaaacatcccttggtggcggaggtg

SEQ ID NO: 1870 - RNA, 89 nt, synthetic construct
  source 1..89: mol_type = other RNA
acagcttatttggaagctgaaatgtgaggtttataacactcacaagaatcctgaaaaaggatgccaaacgatgtcccgttctgcagagt

SEQ ID NO: 1871 - RNA, 89 nt, synthetic construct
  source 1..89: mol_type = other RNA
acagcttatttggaagctgaaatgtgaggtttataacactcacaagaatcctgaaaaaggatgccaaaccctgctcagttttatcccta

SEQ ID NO: 1872 - RNA, 89 nt, synthetic construct
  source 1..89: mol_type = other RNA
acagcttatttggaagctgaaatgtgaggtttataacactcacaagaatcctgaaaaaggatgccaaacaaacaggtcacagccctccc

SEQ ID NO: 1873 - RNA, 89 nt, synthetic construct
  source 1..89: mol_type = other RNA
acagcttatttggaagctgaaatgtgaggtttataacactcacaagaatcctgaaaaaggatgccaaactcactggctctaggctgtaa

SEQ ID NO: 1874 - RNA, 89 nt, synthetic construct
  source 1..89: mol_type = other RNA
acagcttatttggaagctgaaatgtgaggtttataacactcacaagaatcctgaaaaaggatgccaaacctctgagctattagaagcct

SEQ ID NO: 1875 - RNA, 89 nt, synthetic construct
  source 1..89: mol_type = other RNA
acagcttatttggaagctgaaatgtgaggtttataacactcacaagaatcctgaaaaaggatgccaaacatccctgcccagctacggca

SEQ ID NO: 1876 - RNA, 89 nt, synthetic construct
  source 1..89: mol_type = other RNA
acagcttatttggaagctgaaatgtgaggtttataacactcacaagaatcctgaaaaaggatgccaaacgcttctgtgaaggagcctgt

SEQ ID NO: 1877 - RNA, 89 nt, synthetic construct
  source 1..89: mol_type = other RNA
acagcttatttggaagctgaaatgtgaggtttataacactcacaagaatcctgaaaaaggatgccaaactagttctctatctaatatca

SEQ ID NO: 1878 - RNA, 89 nt, synthetic construct
  source 1..89: mol_type = other RNA
acagcttatttggaagctgaaatgtgaggtttataacactcacaagaatcctgaaaaaggatgccaaaccggcagaggagactgttggg

SEQ ID NO: 1879 - RNA, 89 nt, synthetic construct
  source 1..89: mol_type = other RNA
acagcttatttggaagctgaaatgtgaggtttataacactcacaagaatcctgaaaaaggatgccaaacaaggagcctgtcactggctc

SEQ ID NO: 1880 - RNA, 89 nt, synthetic construct
  source 1..89: mol_type = other RNA
acagcttatttggaagctgaaatgtgaggtttataacactcacaagaatcctgaaaaaggatgccaaacgcccacagaaggcttgggac

SEQ ID NO: 1881 - RNA, 89 nt, synthetic construct
  source 1..89: mol_type = other RNA
acagcttatttggaagctgaaatgtgaggtttataacactcacaagaatcctgaaaaaggatgccaaactccctagaagcagctagcta

SEQ ID NO: 1882 - RNA, 89 nt, synthetic construct
  source 1..89: mol_type = other RNA
acagcttatttggaagctgaaatgtgaggtttataacactcacaagaatcctgaaaaaggatgccaaaccctacccaggactgaaaaaa

SEQ ID NO: 1883 - RNA, 89 nt, synthetic construct
  source 1..89: mol_type = other RNA
acagcttatttggaagctgaaatgtgaggtttataacactcacaagaatcctgaaaaaggatgccaaacttgtttctcagcatattaga

SEQ ID NO: 1884 - RNA, 89 nt, synthetic construct
  source 1..89: mol_type = other RNA
acagcttatttggaagctgaaatgtgaggtttataacactcacaagaatcctgaaaaaggatgccaaacttgggatcacaggtggaggt

SEQ ID NO: 1885 - RNA, 89 nt, synthetic construct
  source 1..89: mol_type = other RNA
acagcttatttggaagctgaaatgtgaggtttataacactcacaagaatcctgaaaaaggatgccaaacgcagatggctgcatggcctt

SEQ ID NO: 1886 - RNA, 89 nt, synthetic construct
  source 1..89: mol_type = other RNA
acagcttatttggaagctgaaatgtgaggtttataacactcacaagaatcctgaaaaaggatgccaaaccctcaggctctggtctggac

SEQ ID NO: 1887 - RNA, 89 nt, synthetic construct
  source 1..89: mol_type = other RNA
acagcttatttggaagctgaaatgtgaggtttataacactcacaagaatcctgaaaaaggatgccaaacacctttgcccagctcactgg

SEQ ID NO: 1888 - RNA, 89 nt, synthetic construct
  source 1..89: mol_type = other RNA
acagcttatttggaagctgaaatgtgaggtttataacactcacaagaatcctgaaaaaggatgccaaacgtatccatgcctacccagga

SEQ ID NO: 1889 - RNA, 89 nt, synthetic construct
  source 1..89: mol_type = other RNA
acagcttatttggaagctgaaatgtgaggtttataacactcacaagaatcctgaaaaaggatgccaaacgaagcctttggtatccatgc

SEQ ID NO: 1890 - RNA, 89 nt, synthetic construct
  source 1..89: mol_type = other RNA
acagcttatttggaagctgaaatgtgaggtttataacactcacaagaatcctgaaaaaggatgccaaacggggcatgtaaccttcactc

SEQ ID NO: 1891 - RNA, 89 nt, synthetic construct
  source 1..89: mol_type = other RNA
acagcttatttggaagctgaaatgtgaggtttataacactcacaagaatcctgaaaaaggatgccaaacgggaaagggaggctatgggc

SEQ ID NO: 1892 - RNA, 89 nt, synthetic construct
  source 1..89: mol_type = other RNA
acagcttatttggaagctgaaatgtgaggtttataacactcacaagaatcctgaaaaaggatgccaaactgaaggagcctgtcactggc

SEQ ID NO: 1893 - RNA, 89 nt, synthetic construct
  source 1..89: mol_type = other RNA
acagcttatttggaagctgaaatgtgaggtttataacactcacaagaatcctgaaaaaggatgccaaacgggggggctagaagctgggg

SEQ ID NO: 1894 - RNA, 89 nt, synthetic construct
  source 1..89: mol_type = other RNA
acagcttatttggaagctgaaatgtgaggtttataacactcacaagaatcctgaaaaaggatgccaaacggtagtggcagagctgcctg

SEQ ID NO: 1895 - RNA, 89 nt, synthetic construct
  source 1..89: mol_type = other RNA
acagcttatttggaagctgaaatgtgaggtttataacactcacaagaatcctgaaaaaggatgccaaactcccatcctggagccaatat

SEQ ID NO: 1896 - RNA, 89 nt, synthetic construct
  source 1..89: mol_type = other RNA
acagcttatttggaagctgaaatgtgaggtttataacactcacaagaatcctgaaaaaggatgccaaacgaagctggggaaagggaggc

SEQ ID NO: 1897 - RNA, 89 nt, synthetic construct
  source 1..89: mol_type = other RNA
acagcttatttggaagctgaaatgtgaggtttataacactcacaagaatcctgaaaaaggatgccaaacgctgatcccttggtggcgga

SEQ ID NO: 1898 - RNA, 89 nt, synthetic construct
  source 1..89: mol_type = other RNA
acagcttatttggaagctgaaatgtgaggtttataacactcacaagaatcctgaaaaaggatgccaaacgcgaggaaaagaaacctatt

SEQ ID NO: 1899 - RNA, 89 nt, synthetic construct
  source 1..89: mol_type = other RNA
acagcttatttggaagctgaaatgtgaggtttataacactcacaagaatcctgaaaaaggatgccaaacgactgctcagcaggtgacct

SEQ ID NO: 1900 - RNA, 89 nt, synthetic construct
  source 1..89: mol_type = other RNA
acagcttatttggaagctgaaatgtgaggtttataacactcacaagaatcctgaaaaaggatgccaaacgaaggctttcaggtggcttc

SEQ ID NO: 1901 - RNA, 89 nt, synthetic construct
  source 1..89: mol_type = other RNA
acagcttatttggaagctgaaatgtgaggtttataacactcacaagaatcctgaaaaaggatgccaaacaggtccaaggcttgtcccct

SEQ ID NO: 1902 - RNA, 89 nt, synthetic construct
  source 1..89: mol_type = other RNA
acagcttatttggaagctgaaatgtgaggtttataacactcacaagaatcctgaaaaaggatgccaaactggggggggctagaagctgg

SEQ ID NO: 1903 - RNA, 89 nt, synthetic construct
  source 1..89: mol_type = other RNA
acagcttatttggaagctgaaatgtgaggtttataacactcacaagaatcctgaaaaaggatgccaaactttctcagcatattagagta

SEQ ID NO: 1904 - RNA, 89 nt, synthetic construct
  source 1..89: mol_type = other RNA
acagcttatttggaagctgaaatgtgaggtttataacactcacaagaatcctgaaaaaggatgccaaacggcaatctcagagggatttc

SEQ ID NO: 1905 - RNA, 89 nt, synthetic construct
  source 1..89: mol_type = other RNA
acagcttatttggaagctgaaatgtgaggtttataacactcacaagaatcctgaaaaaggatgccaaacaagcaggcctgaggtccaag

SEQ ID NO: 1906 - RNA, 89 nt, synthetic construct
  source 1..89: mol_type = other RNA
acagcttatttggaagctgaaatgtgaggtttataacactcacaagaatcctgaaaaaggatgccaaactctcaccgacctcatctagg

SEQ ID NO: 1907 - RNA, 89 nt, synthetic construct
  source 1..89: mol_type = other RNA
acagcttatttggaagctgaaatgtgaggtttataacactcacaagaatcctgaaaaaggatgccaaactcccgttctgcagagtattt

SEQ ID NO: 1908 - RNA, 89 nt, synthetic construct
  source 1..89: mol_type = other RNA
acagcttatttggaagctgaaatgtgaggtttataacactcacaagaatcctgaaaaaggatgccaaactcagtgggagaaaggcttgg

SEQ ID NO: 1909 - RNA, 89 nt, synthetic construct
  source 1..89: mol_type = other RNA
acagcttatttggaagctgaaatgtgaggtttataacactcacaagaatcctgaaaaaggatgccaaacgaagcagctagctactccag

SEQ ID NO: 1910 - RNA, 89 nt, synthetic construct
  source 1..89: mol_type = other RNA
acagcttatttggaagctgaaatgtgaggtttataacactcacaagaatcctgaaaaaggatgccaaacatatcagtgggagaaaggct

SEQ ID NO: 1911 - RNA, 89 nt, synthetic construct
  source 1..89: mol_type = other RNA
acagcttatttggaagctgaaatgtgaggtttataacactcacaagaatcctgaaaaaggatgccaaacatgcccctggggaggagagg

SEQ ID NO: 1912 - RNA, 89 nt, synthetic construct
  source 1..89: mol_type = other RNA
acagcttatttggaagctgaaatgtgaggtttataacactcacaagaatcctgaaaaaggatgccaaactcccttgtttagcttgctct

SEQ ID NO: 1913 - RNA, 89 nt, synthetic construct
  source 1..89: mol_type = other RNA
acagcttatttggaagctgaaatgtgaggtttataacactcacaagaatcctgaaaaaggatgccaaaccccgctgtcccatcctggag

SEQ ID NO: 1914 - RNA, 89 nt, synthetic construct
  source 1..89: mol_type = other RNA
acagcttatttggaagctgaaatgtgaggtttataacactcacaagaatcctgaaaaaggatgccaaacgagccaatataaaacaggtc

SEQ ID NO: 1915 - RNA, 89 nt, synthetic construct
  source 1..89: mol_type = other RNA
acagcttatttggaagctgaaatgtgaggtttataacactcacaagaatcctgaaaaaggatgccaaacgccttcctgcctcaggctct

SEQ ID NO: 1916 - RNA, 89 nt, synthetic construct
  source 1..89: mol_type = other RNA
acagcttatttggaagctgaaatgtgaggtttataacactcacaagaatcctgaaaaaggatgccaaacggctgtaaagcaggcctgag

SEQ ID NO: 1917 - RNA, 89 nt, synthetic construct
  source 1..89: mol_type = other RNA
acagcttatttggaagctgaaatgtgaggtttataacactcacaagaatcctgaaaaaggatgccaaactaaagcaggcctgaggtcca

SEQ ID NO: 1918 - RNA, 89 nt, synthetic construct
  source 1..89: mol_type = other RNA
acagcttatttggaagctgaaatgtgaggtttataacactcacaagaatcctgaaaaaggatgccaaacgcggaggtggccgtgaaaag

SEQ ID NO: 1919 - RNA, 89 nt, synthetic construct
  source 1..89: mol_type = other RNA
acagcttatttggaagctgaaatgtgaggtttataacactcacaagaatcctgaaaaaggatgccaaacagccggtagctgatcccttg

SEQ ID NO: 1920 - RNA, 89 nt, synthetic construct
  source 1..89: mol_type = other RNA
acagcttatttggaagctgaaatgtgaggtttataacactcacaagaatcctgaaaaaggatgccaaacgtggcggaggtggccgtgaa

SEQ ID NO: 1921 - RNA, 89 nt, synthetic construct
  source 1..89: mol_type = other RNA
acagcttatttggaagctgaaatgtgaggtttataacactcacaagaatcctgaaaaaggatgccaaactactccaccttccaccccac

SEQ ID NO: 1922 - RNA, 89 nt, synthetic construct
  source 1..89: mol_type = other RNA
acagcttatttggaagctgaaatgtgaggtttataacactcacaagaatcctgaaaaaggatgccaaacgttctctatctaatatcagt

SEQ ID NO: 1923 - RNA, 89 nt, synthetic construct
  source 1..89: mol_type = other RNA
acagcttatttggaagctgaaatgtgaggtttataacactcacaagaatcctgaaaaaggatgccaaaccccagctcactgggccttct

SEQ ID NO: 1924 - RNA, 89 nt, synthetic construct
  source 1..89: mol_type = other RNA
acagcttatttggaagctgaaatgtgaggtttataacactcacaagaatcctgaaaaaggatgccaaactgggccaaaagccttgcact

SEQ ID NO: 1925 - RNA, 89 nt, synthetic construct
  source 1..89: mol_type = other RNA
acagcttatttggaagctgaaatgtgaggtttataacactcacaagaatcctgaaaaaggatgccaaacctccaccttccaccccactt

SEQ ID NO: 1926 - RNA, 89 nt, synthetic construct
  source 1..89: mol_type = other RNA
acagcttatttggaagctgaaatgtgaggtttataacactcacaagaatcctgaaaaaggatgccaaacgaggtcagtgtgggggcatg

SEQ ID NO: 1927 - RNA, 89 nt, synthetic construct
  source 1..89: mol_type = other RNA
acagcttatttggaagctgaaatgtgaggtttataacactcacaagaatcctgaaaaaggatgccaaaccactgggtagtggcagagct

SEQ ID NO: 1928 - RNA, 89 nt, synthetic construct
  source 1..89: mol_type = other RNA
acagcttatttggaagctgaaatgtgaggtttataacactcacaagaatcctgaaaaaggatgccaaaccccaggactgaaaaaactga

SEQ ID NO: 1929 - RNA, 89 nt, synthetic construct
  source 1..89: mol_type = other RNA
acagcttatttggaagctgaaatgtgaggtttataacactcacaagaatcctgaaaaaggatgccaaaccctgcaattgggtcatgctg

SEQ ID NO: 1930 - RNA, 89 nt, synthetic construct
  source 1..89: mol_type = other RNA
acagcttatttggaagctgaaatgtgaggtttataacactcacaagaatcctgaaaaaggatgccaaacccccctcccaccccacttcc

SEQ ID NO: 1931 - RNA, 89 nt, synthetic construct
  source 1..89: mol_type = other RNA
acagcttatttggaagctgaaatgtgaggtttataacactcacaagaatcctgaaaaaggatgccaaacggagaaaggcttgggattca

SEQ ID NO: 1932 - RNA, 89 nt, synthetic construct
  source 1..89: mol_type = other RNA
acagcttatttggaagctgaaatgtgaggtttataacactcacaagaatcctgaaaaaggatgccaaactaaccttcactctgccccct

SEQ ID NO: 1933 - RNA, 89 nt, synthetic construct
  source 1..89: mol_type = other RNA
acagcttatttggaagctgaaatgtgaggtttataacactcacaagaatcctgaaaaaggatgccaaaccatggccttcctgcctcagg

SEQ ID NO: 1934 - RNA, 89 nt, synthetic construct
  source 1..89: mol_type = other RNA
acagcttatttggaagctgaaatgtgaggtttataacactcacaagaatcctgaaaaaggatgccaaactccatgcctacccaggactg

SEQ ID NO: 1935 - RNA, 89 nt, synthetic construct
  source 1..89: mol_type = other RNA
acagcttatttggaagctgaaatgtgaggtttataacactcacaagaatcctgaaaaaggatgccaaacctccacagtggcaccacaga

SEQ ID NO: 1936 - RNA, 89 nt, synthetic construct
  source 1..89: mol_type = other RNA
acagcttatttggaagctgaaatgtgaggtttataacactcacaagaatcctgaaaaaggatgccaaacggccttctgtgcccgctgtc

SEQ ID NO: 1937 - RNA, 89 nt, synthetic construct
  source 1..89: mol_type = other RNA
acagcttatttggaagctgaaatgtgaggtttataacactcacaagaatcctgaaaaaggatgccaaacgtctggactgctcagcaggt

SEQ ID NO: 1938 - RNA, 89 nt, synthetic construct
  source 1..89: mol_type = other RNA
acagcttatttggaagctgaaatgtgaggtttataacactcacaagaatcctgaaaaaggatgccaaacctcagcaggtgacctttgcc

SEQ ID NO: 1939 - RNA, 89 nt, synthetic construct
  source 1..89: mol_type = other RNA
acagcttatttggaagctgaaatgtgaggtttataacactcacaagaatcctgaaaaaggatgccaaacgcttgctctgagctattaga

SEQ ID NO: 1940 - RNA, 89 nt, synthetic construct
  source 1..89: mol_type = other RNA
acagcttatttggaagctgaaatgtgaggtttataacactcacaagaatcctgaaaaaggatgccaaactccttctctcactaatccct

SEQ ID NO: 1941 - RNA, 89 nt, synthetic construct
  source 1..89: mol_type = other RNA
acagcttatttggaagctgaaatgtgaggtttataacactcacaagaatcctgaaaaaggatgccaaacttagagtagatgtcccgttc

SEQ ID NO: 1942 - RNA, 89 nt, synthetic construct
  source 1..89: mol_type = other RNA
acagcttatttggaagctgaaatgtgaggtttataacactcacaagaatcctgaaaaaggatgccaaactaaaacaggtcacagccctc

SEQ ID NO: 1943 - RNA, 89 nt, synthetic construct
  source 1..89: mol_type = other RNA
acagcttatttggaagctgaaatgtgaggtttataacactcacaagaatcctgaaaaaggatgccaaacagtcctagcgaggaaaagaa

SEQ ID NO: 1944 - RNA, 89 nt, synthetic construct
  source 1..89: mol_type = other RNA
acagcttatttggaagctgaaatgtgaggtttataacactcacaagaatcctgaaaaaggatgccaaacgagggagaagctctcaccac

SEQ ID NO: 1945 - RNA, 89 nt, synthetic construct
  source 1..89: mol_type = other RNA
acagcttatttggaagctgaaatgtgaggtttataacactcacaagaatcctgaaaaaggatgccaaacgtctccacccttgggttcct

SEQ ID NO: 1946 - RNA, 89 nt, synthetic construct
  source 1..89: mol_type = other RNA
acagcttatttggaagctgaaatgtgaggtttataacactcacaagaatcctgaaaaaggatgccaaaccccagctacggcagaggaga

SEQ ID NO: 1947 - RNA, 89 nt, synthetic construct
  source 1..89: mol_type = other RNA
acagcttatttggaagctgaaatgtgaggtttataacactcacaagaatcctgaaaaaggatgccaaactttagcttgctctgagctat

SEQ ID NO: 1948 - RNA, 89 nt, synthetic construct
  source 1..89: mol_type = other RNA
acagcttatttggaagctgaaatgtgaggtttataacactcacaagaatcctgaaaaaggatgccaaacggactcatggtctccaccct

SEQ ID NO: 1949 - RNA, 89 nt, synthetic construct
  source 1..89: mol_type = other RNA
acagcttatttggaagctgaaatgtgaggtttataacactcacaagaatcctgaaaaaggatgccaaacggtcatgctgtcccttgttt

SEQ ID NO: 1950 - RNA, 89 nt, synthetic construct
  source 1..89: mol_type = other RNA
acagcttatttggaagctgaaatgtgaggtttataacactcacaagaatcctgaaaaaggatgccaaacgccgtgaaaagcatgggcaa

SEQ ID NO: 1951 - RNA, 89 nt, synthetic construct
  source 1..89: mol_type = other RNA
acagcttatttggaagctgaaatgtgaggtttataacactcacaagaatcctgaaaaaggatgccaaacttagaagcctttggtatcca

SEQ ID NO: 1952 - RNA, 89 nt, synthetic construct
  source 1..89: mol_type = other RNA
acagcttatttggaagctgaaatgtgaggtttataacactcacaagaatcctgaaaaaggatgccaaacggatcacaggtggaggtcag

SEQ ID NO: 1953 - RNA, 89 nt, synthetic construct
  source 1..89: mol_type = other RNA
acagcttatttggaagctgaaatgtgaggtttataacactcacaagaatcctgaaaaaggatgccaaaccaattgggtcatgctgtccc

SEQ ID NO: 1954 - RNA, 89 nt, synthetic construct
  source 1..89: mol_type = other RNA
acagcttatttggaagctgaaatgtgaggtttataacactcacaagaatcctgaaaaaggatgccaaacgctctaggctgtaaagcagg

SEQ ID NO: 1955 - RNA, 89 nt, synthetic construct
  source 1..89: mol_type = other RNA
acagcttatttggaagctgaaatgtgaggtttataacactcacaagaatcctgaaaaaggatgccaaacggttcctggtgtgggggggg

SEQ ID NO: 1956 - RNA, 89 nt, synthetic construct
  source 1..89: mol_type = other RNA
acagcttatttggaagctgaaatgtgaggtttataacactcacaagaatcctgaaaaaggatgccaaacgtggcagagctgcctgcaat

SEQ ID NO: 1957 - RNA, 89 nt, synthetic construct
  source 1..89: mol_type = other RNA
acagcttatttggaagctgaaatgtgaggtttataacactcacaagaatcctgaaaaaggatgccaaacgcaccacagattccccattc

SEQ ID NO: 1958 - RNA, 89 nt, synthetic construct
  source 1..89: mol_type = other RNA
acagcttatttggaagctgaaatgtgaggtttataacactcacaagaatcctgaaaaaggatgccaaactttctatactccaccttcca

SEQ ID NO: 1959 - RNA, 89 nt, synthetic construct
  source 1..89: mol_type = other RNA
acagcttatttggaagctgaaatgtgaggtttataacactcacaagaatcctgaaaaaggatgccaaacgtgtggggggggctagaagc

SEQ ID NO: 1960 - RNA, 89 nt, synthetic construct
  source 1..89: mol_type = other RNA
acagcttatttggaagctgaaatgtgaggtttataacactcacaagaatcctgaaaaaggatgccaaacaccttcactctgccccctcc

SEQ ID NO: 1961 - RNA, 89 nt, synthetic construct
  source 1..89: mol_type = other RNA
acagcttatttggaagctgaaatgtgaggtttataacactcacaagaatcctgaaaaaggatgccaaacgctgcatggccttcctgcct

SEQ ID NO: 1962 - RNA, 89 nt, synthetic construct
  source 1..89: mol_type = other RNA
acagcttatttggaagctgaaatgtgaggtttataacactcacaagaatcctgaaaaaggatgccaaactgggggcatgtaaccttcac

SEQ ID NO: 1963 - RNA, 89 nt, synthetic construct
  source 1..89: mol_type = other RNA
acagcttatttggaagctgaaatgtgaggtttataacactcacaagaatcctgaaaaaggatgccaaacgggggctgggtctactgtag

SEQ ID NO: 1964 - RNA, 89 nt, synthetic construct
  source 1..89: mol_type = other RNA
acagcttatttggaagctgaaatgtgaggtttataacactcacaagaatcctgaaaaaggatgccaaacgcagagctgcctgcaattgg

SEQ ID NO: 1965 - RNA, 89 nt, synthetic construct
  source 1..89: mol_type = other RNA
acagcttatttggaagctgaaatgtgaggtttataacactcacaagaatcctgaaaaaggatgccaaacaaaaaactgagtcctagcga

SEQ ID NO: 1966 - RNA, 89 nt, synthetic construct
  source 1..89: mol_type = other RNA
acagcttatttggaagctgaaatgtgaggtttataacactcacaagaatcctgaaaaaggatgccaaacagctattagaagcctttggt

SEQ ID NO: 1967 - RNA, 89 nt, synthetic construct
  source 1..89: mol_type = other RNA
acagcttatttggaagctgaaatgtgaggtttataacactcacaagaatcctgaaaaaggatgccaaacgggaggagaggaaggaaggg

SEQ ID NO: 1968 - RNA, 89 nt, synthetic construct
  source 1..89: mol_type = other RNA
acagcttatttggaagctgaaatgtgaggtttataacactcacaagaatcctgaaaaaggatgccaaactcttttcctgtctcaccgac

SEQ ID NO: 1969 - RNA, 89 nt, synthetic construct
  source 1..89: mol_type = other RNA
acagcttatttggaagctgaaatgtgaggtttataacactcacaagaatcctgaaaaaggatgccaaacgagtagatgtcccgttctgc

SEQ ID NO: 1970 - RNA, 20 nt, synthetic construct
  source 1..20: mol_type = other RNA
cacccgcaccttggcgcagc

SEQ ID NO: 1971 - RNA, 20 nt, synthetic construct
  source 1..20: mol_type = other RNA
gggccaggatccgtggaggt

SEQ ID NO: 1972 - RNA, 20 nt, synthetic construct
  source 1..20: mol_type = other RNA
gctcaccagctccagcaggt

SEQ ID NO: 1973 - RNA, 20 nt, synthetic construct
  source 1..20: mol_type = other RNA
gcttctgcaggccttgaagt

SEQ ID NO: 1974 - RNA, 20 nt, synthetic construct
  source 1..20: mol_type = other RNA
ggggtcttaccggggggctg

SEQ ID NO: 1975 - RNA, 20 nt, synthetic construct
  source 1..20: mol_type = other RNA
gaaagacggaggcagcctgg

SEQ ID NO: 1976 - RNA, 20 nt, synthetic construct
  source 1..20: mol_type = other RNA
cttacctgtctgtggaagcg

SEQ ID NO: 1977 - RNA, 20 nt, synthetic construct
  source 1..20: mol_type = other RNA
ttcgtcgagcaggccagcaa

SEQ ID NO: 1978 - RNA, 20 nt, synthetic construct
  source 1..20: mol_type = other RNA
gggccatcacttacctatga

SEQ ID NO: 1979 - RNA, 20 nt, synthetic construct
  source 1..20: mol_type = other RNA
ttcctcccaggcctggagtt

SEQ ID NO: 1980 - RNA, 20 nt, synthetic construct
  source 1..20: mol_type = other RNA
atgacctggaaaggtgagga

SEQ ID NO: 1981 - RNA, 20 nt, synthetic construct
  source 1..20: mol_type = other RNA
caccaggcattgcagccatg

SEQ ID NO: 1982 - RNA, 20 nt, synthetic construct
  source 1..20: mol_type = other RNA
cttacctgccccatgggtgc

SEQ ID NO: 1983 - RNA, 20 nt, synthetic construct
  source 1..20: mol_type = other RNA
cagtcacctccatgcgctcg

SEQ ID NO: 1984 - RNA, 20 nt, synthetic construct
  source 1..20: mol_type = other RNA
actctaaggcccaagggggc

SEQ ID NO: 1985 - RNA, 20 nt, synthetic construct
  source 1..20: mol_type = other RNA
ccccaggctgcagctcccac

SEQ ID NO: 1986 - RNA, 20 nt, synthetic construct
  source 1..20: mol_type = other RNA
gcaggtgaccgtggcctgcg

SEQ ID NO: 1987 - RNA, 20 nt, synthetic construct
  source 1..20: mol_type = other RNA
cctcgccgcggcacaggtgg

SEQ ID NO: 1988 - RNA, 20 nt, synthetic construct
  source 1..20: mol_type = other RNA
ccaggcaacctccacggatc

SEQ ID NO: 1989 - RNA, 20 nt, synthetic construct
  source 1..20: mol_type = other RNA
gcgacctgctggagctggtg

SEQ ID NO: 1990 - RNA, 20 nt, synthetic construct
  source 1..20: mol_type = other RNA
agtggcgacctgctggagct

SEQ ID NO: 1991 - RNA, 20 nt, synthetic construct
  source 1..20: mol_type = other RNA
actgtcacacttgctggcct

SEQ ID NO: 1992 - RNA, 20 nt, synthetic construct
  source 1..20: mol_type = other RNA
ctccccagcctcagctcccg

SEQ ID NO: 1993 - RNA, 20 nt, synthetic construct
  source 1..20: mol_type = other RNA
gccccaactgtgatgacctg

SEQ ID NO: 1994 - RNA, 20 nt, synthetic construct
  source 1..20: mol_type = other RNA
ccccccagcacccatggggc

SEQ ID NO: 1995 - RNA, 20 nt, synthetic construct
  source 1..20: mol_type = other RNA
caaaacagctgccaacctgc

SEQ ID NO: 1996 - RNA, 20 nt, synthetic construct
  source 1..20: mol_type = other RNA
cttactttaagtgaagttac

SEQ ID NO: 1997 - RNA, 20 nt, synthetic construct
  source 1..20: mol_type = other RNA
ttttctacttactttaagtg

SEQ ID NO: 1998 - RNA, 20 nt, synthetic construct
  source 1..20: mol_type = other RNA
tccagacttttgtagaaaaa

SEQ ID NO: 1999 - RNA, 20 nt, synthetic construct
  source 1..20: mol_type = other RNA
aaatactgacttacctgatt

SEQ ID NO: 2000 - RNA, 20 nt, synthetic construct
  source 1..20: mol_type = other RNA
tcagctcagaaggactagta

SEQ ID NO: 2001 - RNA, 20 nt, synthetic construct
  source 1..20: mol_type = other RNA
tcttaccatcatgttttaca

SEQ ID NO: 2002 - RNA, 20 nt, synthetic construct
  source 1..20: mol_type = other RNA
ttgattctaggcattcctgc

SEQ ID NO: 2003 - RNA, 20 nt, synthetic construct
  source 1..20: mol_type = other RNA
ttcaggtagtccatggacat

SEQ ID NO: 2004 - RNA, 20 nt, synthetic construct
  source 1..20: mol_type = other RNA
gtccccttaccatcaagcct

SEQ ID NO: 2005 - RNA, 20 nt, synthetic construct
  source 1..20: mol_type = other RNA
aaacttttcttttcaggaga

SEQ ID NO: 2006 - RNA, 20 nt, synthetic construct
  source 1..20: mol_type = other RNA
tcagaaaaagatacctgaat

SEQ ID NO: 2007 - RNA, 20 nt, synthetic construct
  source 1..20: mol_type = other RNA
tctcctttaggaggctggtg

SEQ ID NO: 2008 - RNA, 20 nt, synthetic construct
  source 1..20: mol_type = other RNA
tcttgtttttctacaaaagt

SEQ ID NO: 2009 - RNA, 20 nt, synthetic construct
  source 1..20: mol_type = other RNA
aaagaaatagaaaatcaggt

SEQ ID NO: 2010 - RNA, 20 nt, synthetic construct
  source 1..20: mol_type = other RNA
aatactagtccttctgagct

SEQ ID NO: 2011 - RNA, 20 nt, synthetic construct
  source 1..20: mol_type = other RNA
agaaatgtaaaacatgatgg

SEQ ID NO: 2012 - RNA, 20 nt, synthetic construct
  source 1..20: mol_type = other RNA
cattcagcaggaatgcctag

SEQ ID NO: 2013 - RNA, 20 nt, synthetic construct
  source 1..20: mol_type = other RNA
gtggtacattcagcaggaat

SEQ ID NO: 2014 - RNA, 20 nt, synthetic construct
  source 1..20: mol_type = other RNA
aattaatgtccatggactac

SEQ ID NO: 2015 - RNA, 20 nt, synthetic construct
  source 1..20: mol_type = other RNA
gttttgggaggcttgatggt

SEQ ID NO: 2016 - RNA, 20 nt, synthetic construct
  source 1..20: mol_type = other RNA
ggcccaaccaaaattctcct

SEQ ID NO: 2017 - RNA, 20 nt, synthetic construct
  source 1..20: mol_type = other RNA
tccagagggttattcaggta

SEQ ID NO: 2018 - RNA, 20 nt, synthetic construct
  source 1..20: mol_type = other RNA
cttacgggcagaggccagga

SEQ ID NO: 2019 - RNA, 20 nt, synthetic construct
  source 1..20: mol_type = other RNA
ctctttcctcaggagcttca

SEQ ID NO: 2020 - RNA, 20 nt, synthetic construct
  source 1..20: mol_type = other RNA
atttaggggctgggtgaccg

SEQ ID NO: 2021 - RNA, 20 nt, synthetic construct
  source 1..20: mol_type = other RNA
actgatttaggggctgggtg

SEQ ID NO: 2022 - RNA, 20 nt, synthetic construct
  source 1..20: mol_type = other RNA
cttcccctgactgatttagg

SEQ ID NO: 2023 - RNA, 20 nt, synthetic construct
  source 1..20: mol_type = other RNA
gaggcagctgctccaggtaa

SEQ ID NO: 2024 - RNA, 20 nt, synthetic construct
  source 1..20: mol_type = other RNA
catggcacctctgttcctgc

SEQ ID NO: 2025 - RNA, 20 nt, synthetic construct
  source 1..20: mol_type = other RNA
gcgctcctggcctctgcccg

SEQ ID NO: 2026 - RNA, 20 nt, synthetic construct
  source 1..20: mol_type = other RNA
aagccatcggtcacccagcc

SEQ ID NO: 2027 - RNA, 89 nt, synthetic construct
  source 1..89: mol_type = other RNA
acagcttatttggaagctgaaatgtgaggtttataacactcacaagaatcctgaaaaaggatgccaaaccttactttaagtgaagttac

SEQ ID NO: 2028 - RNA, 89 nt, synthetic construct
  source 1..89: mol_type = other RNA
acagcttatttggaagctgaaatgtgaggtttataacactcacaagaatcctgaaaaaggatgccaaacttttctacttactttaagtg

SEQ ID NO: 2029 - RNA, 89 nt, synthetic construct
  source 1..89: mol_type = other RNA
acagcttatttggaagctgaaatgtgaggtttataacactcacaagaatcctgaaaaaggatgccaaactccagacttttgtagaaaaa

SEQ ID NO: 2030 - RNA, 89 nt, synthetic construct
  source 1..89: mol_type = other RNA
acagcttatttggaagctgaaatgtgaggtttataacactcacaagaatcctgaaaaaggatgccaaacaaatactgacttacctgatt

SEQ ID NO: 2031 - RNA, 89 nt, synthetic construct
  source 1..89: mol_type = other RNA
acagcttatttggaagctgaaatgtgaggtttataacactcacaagaatcctgaaaaaggatgccaaactcagctcagaaggactagta

SEQ ID NO: 2032 - RNA, 89 nt, synthetic construct
  source 1..89: mol_type = other RNA
acagcttatttggaagctgaaatgtgaggtttataacactcacaagaatcctgaaaaaggatgccaaactcttaccatcatgttttaca

SEQ ID NO: 2033 - RNA, 89 nt, synthetic construct
  source 1..89: mol_type = other RNA
acagcttatttggaagctgaaatgtgaggtttataacactcacaagaatcctgaaaaaggatgccaaacttgattctaggcattcctgc

SEQ ID NO: 2034 - RNA, 89 nt, synthetic construct
  source 1..89: mol_type = other RNA
acagcttatttggaagctgaaatgtgaggtttataacactcacaagaatcctgaaaaaggatgccaaacttcaggtagtccatggacat

SEQ ID NO: 2035 - RNA, 89 nt, synthetic construct
  source 1..89: mol_type = other RNA
acagcttatttggaagctgaaatgtgaggtttataacactcacaagaatcctgaaaaaggatgccaaacgtccccttaccatcaagcct

SEQ ID NO: 2036 - RNA, 89 nt, synthetic construct
  source 1..89: mol_type = other RNA
acagcttatttggaagctgaaatgtgaggtttataacactcacaagaatcctgaaaaaggatgccaaacaaacttttcttttcaggaga

SEQ ID NO: 2037 - RNA, 89 nt, synthetic construct
  source 1..89: mol_type = other RNA
acagcttatttggaagctgaaatgtgaggtttataacactcacaagaatcctgaaaaaggatgccaaactcagaaaaagatacctgaat

SEQ ID NO: 2038 - RNA, 89 nt, synthetic construct
  source 1..89: mol_type = other RNA
acagcttatttggaagctgaaatgtgaggtttataacactcacaagaatcctgaaaaaggatgccaaactctcctttaggaggctggtg

SEQ ID NO: 2039 - RNA, 89 nt, synthetic construct
  source 1..89: mol_type = other RNA
acagcttatttggaagctgaaatgtgaggtttataacactcacaagaatcctgaaaaaggatgccaaactcttgtttttctacaaaagt

SEQ ID NO: 2040 - RNA, 89 nt, synthetic construct
  source 1..89: mol_type = other RNA
acagcttatttggaagctgaaatgtgaggtttataacactcacaagaatcctgaaaaaggatgccaaacaaagaaatagaaaatcaggt

SEQ ID NO: 2041 - RNA, 89 nt, synthetic construct
  source 1..89: mol_type = other RNA
acagcttatttggaagctgaaatgtgaggtttataacactcacaagaatcctgaaaaaggatgccaaacaatactagtccttctgagct

SEQ ID NO: 2042 - RNA, 89 nt, synthetic construct
  source 1..89: mol_type = other RNA
acagcttatttggaagctgaaatgtgaggtttataacactcacaagaatcctgaaaaaggatgccaaacagaaatgtaaaacatgatgg

SEQ ID NO: 2043 - RNA, 89 nt, synthetic construct
  source 1..89: mol_type = other RNA
acagcttatttggaagctgaaatgtgaggtttataacactcacaagaatcctgaaaaaggatgccaaaccattcagcaggaatgcctag

SEQ ID NO: 2044 - RNA, 89 nt, synthetic construct
  source 1..89: mol_type = other RNA
acagcttatttggaagctgaaatgtgaggtttataacactcacaagaatcctgaaaaaggatgccaaacgtggtacattcagcaggaat

SEQ ID NO: 2045 - RNA, 89 nt, synthetic construct
  source 1..89: mol_type = other RNA
acagcttatttggaagctgaaatgtgaggtttataacactcacaagaatcctgaaaaaggatgccaaacaattaatgtccatggactac

SEQ ID NO: 2046 - RNA, 89 nt, synthetic construct
  source 1..89: mol_type = other RNA
acagcttatttggaagctgaaatgtgaggtttataacactcacaagaatcctgaaaaaggatgccaaacgttttgggaggcttgatggt

SEQ ID NO: 2047 - RNA, 89 nt, synthetic construct
  source 1..89: mol_type = other RNA
acagcttatttggaagctgaaatgtgaggtttataacactcacaagaatcctgaaaaaggatgccaaacggcccaaccaaaattctcct

SEQ ID NO: 2048 - RNA, 89 nt, synthetic construct
  source 1..89: mol_type = other RNA
acagcttatttggaagctgaaatgtgaggtttataacactcacaagaatcctgaaaaaggatgccaaactccagagggttattcaggta

SEQ ID NO: 2049 - RNA, 89 nt, synthetic construct
  source 1..89: mol_type = other RNA
acagcttatttggaagctgaaatgtgaggtttataacactcacaagaatcctgaaaaaggatgccaaaccttacgggcagaggccagga

SEQ ID NO: 2050 - RNA, 89 nt, synthetic construct; identical to SEQ ID NO: 566
  source 1..89: mol_type = other RNA

SEQ ID NO: 2051 - RNA, 89 nt, synthetic construct
  source 1..89: mol_type = other RNA
acagcttatttggaagctgaaatgtgaggtttataacactcacaagaatcctgaaaaaggatgccaaacatttaggggctgggtgaccg

SEQ ID NO: 2052 - RNA, 89 nt, synthetic construct
  source 1..89: mol_type = other RNA
acagcttatttggaagctgaaatgtgaggtttataacactcacaagaatcctgaaaaaggatgccaaacactgatttaggggctgggtg

SEQ ID NO: 2053 - RNA, 89 nt, synthetic construct
  source 1..89: mol_type = other RNA
acagcttatttggaagctgaaatgtgaggtttataacactcacaagaatcctgaaaaaggatgccaaaccttcccctgactgatttagg

SEQ ID NO: 2054 - RNA, 89 nt, synthetic construct; identical to SEQ ID NO: 1598
  source 1..89: mol_type = other RNA

SEQ ID NO: 2055 - RNA, 89 nt, synthetic construct
  source 1..89: mol_type = other RNA
acagcttatttggaagctgaaatgtgaggtttataacactcacaagaatcctgaaaaaggatgccaaaccatggcacctctgttcctgc

SEQ ID NO: 2056 - RNA, 89 nt, synthetic construct
  source 1..89: mol_type = other RNA
acagcttatttggaagctgaaatgtgaggtttataacactcacaagaatcctgaaaaaggatgccaaacgcgctcctggcctctgcccg

SEQ ID NO: 2057 - RNA, 89 nt, synthetic construct; identical to SEQ ID NO: 515
  source 1..89: mol_type = other RNA

SEQ ID NO: 2058 - RNA, 89 nt, synthetic construct
  source 1..89: mol_type = other RNA
acagcttatttggaagctgaaatgtgaggtttataacactcacaagaatcctgaaaaaggatgccaaaccacccgcaccttggcgcagc

SEQ ID NO: 2059 - RNA, 89 nt, synthetic construct
  source 1..89: mol_type = other RNA
acagcttatttggaagctgaaatgtgaggtttataacactcacaagaatcctgaaaaaggatgccaaacgggccaggatccgtggaggt

SEQ ID NO: 2060 - RNA, 89 nt, synthetic construct
  source 1..89: mol_type = other RNA
acagcttatttggaagctgaaatgtgaggtttataacactcacaagaatcctgaaaaaggatgccaaacgctcaccagctccagcaggt

SEQ ID NO: 2061 - RNA, 89 nt, synthetic construct
  source 1..89: mol_type = other RNA
acagcttatttggaagctgaaatgtgaggtttataacactcacaagaatcctgaaaaaggatgccaaacgcttctgcaggccttgaagt

SEQ ID NO: 2062 - RNA, 89 nt, synthetic construct
  source 1..89: mol_type = other RNA
acagcttatttggaagctgaaatgtgaggtttataacactcacaagaatcctgaaaaaggatgccaaacggggtcttaccggggggctg

SEQ ID NO: 2063 - RNA, 89 nt, synthetic construct
  source 1..89: mol_type = other RNA
acagcttatttggaagctgaaatgtgaggtttataacactcacaagaatcctgaaaaaggatgccaaacgaaagacggaggcagcctgg

SEQ ID NO: 2064 - RNA, 89 nt, synthetic construct
  source 1..89: mol_type = other RNA
acagcttatttggaagctgaaatgtgaggtttataacactcacaagaatcctgaaaaaggatgccaaaccttacctgtctgtggaagcg

SEQ ID NO: 2065 - RNA, 89 nt, synthetic construct
  source 1..89: mol_type = other RNA
acagcttatttggaagctgaaatgtgaggtttataacactcacaagaatcctgaaaaaggatgccaaacttcgtcgagcaggccagcaa

SEQ ID NO: 2066 - RNA, 89 nt, synthetic construct
  source 1..89: mol_type = other RNA
acagcttatttggaagctgaaatgtgaggtttataacactcacaagaatcctgaaaaaggatgccaaacgggccatcacttacctatga

SEQ ID NO: 2067 - RNA, 89 nt, synthetic construct
  source 1..89: mol_type = other RNA
acagcttatttggaagctgaaatgtgaggtttataacactcacaagaatcctgaaaaaggatgccaaacttcctcccaggcctggagtt

SEQ ID NO: 2068 - RNA, 89 nt, synthetic construct
  source 1..89: mol_type = other RNA
acagcttatttggaagctgaaatgtgaggtttataacactcacaagaatcctgaaaaaggatgccaaacatgacctggaaaggtgagga

SEQ ID NO: 2069 - RNA, 89 nt, synthetic construct
  source 1..89: mol_type = other RNA
acagcttatttggaagctgaaatgtgaggtttataacactcacaagaatcctgaaaaaggatgccaaaccaccaggcattgcagccatg

SEQ ID NO: 2070 - RNA, 89 nt, synthetic construct
  source 1..89: mol_type = other RNA
acagcttatttggaagctgaaatgtgaggtttataacactcacaagaatcctgaaaaaggatgccaaaccttacctgccccatgggtgc

SEQ ID NO: 2071 - RNA, 89 nt, synthetic construct
  source 1..89: mol_type = other RNA
acagcttatttggaagctgaaatgtgaggtttataacactcacaagaatcctgaaaaaggatgccaaaccagtcacctccatgcgctcg

SEQ ID NO: 2072 - RNA, 89 nt, synthetic construct
  source 1..89: mol_type = other RNA
acagcttatttggaagctgaaatgtgaggtttataacactcacaagaatcctgaaaaaggatgccaaacactctaaggcccaagggggc

SEQ ID NO: 2073 - RNA, 89 nt, synthetic construct
  source 1..89: mol_type = other RNA
acagcttatttggaagctgaaatgtgaggtttataacactcacaagaatcctgaaaaaggatgccaaacccccaggctgcagctcccac

SEQ ID NO: 2074 - RNA, 89 nt, synthetic construct
  source 1..89: mol_type = other RNA
acagcttatttggaagctgaaatgtgaggtttataacactcacaagaatcctgaaaaaggatgccaaacgcaggtgaccgtggcctgcg

SEQ ID NO: 2075 - RNA, 89 nt, synthetic construct
  source 1..89: mol_type = other RNA
acagcttatttggaagctgaaatgtgaggtttataacactcacaagaatcctgaaaaaggatgccaaaccctcgccgcggcacaggtgg

SEQ ID NO: 2076 - RNA, 89 nt, synthetic construct
  source 1..89: mol_type = other RNA
acagcttatttggaagctgaaatgtgaggtttataacactcacaagaatcctgaaaaaggatgccaaacccaggcaacctccacggatc

SEQ ID NO: 2077 - RNA, 89 nt, synthetic construct
  source 1..89: mol_type = other RNA
acagcttatttggaagctgaaatgtgaggtttataacactcacaagaatcctgaaaaaggatgccaaacgcgacctgctggagctggtg

SEQ ID NO: 2078 - RNA, 89 nt, synthetic construct
  source 1..89: mol_type = other RNA
acagcttatttggaagctgaaatgtgaggtttataacactcacaagaatcctgaaaaaggatgccaaacagtggcgacctgctggagct

SEQ ID NO: 2079 - RNA, 89 nt, synthetic construct
  source 1..89: mol_type = other RNA
acagcttatttggaagctgaaatgtgaggtttataacactcacaagaatcctgaaaaaggatgccaaacactgtcacacttgctggcct

SEQ ID NO: 2080 - RNA, 89 nt, synthetic construct
  source 1..89: mol_type = other RNA
acagcttatttggaagctgaaatgtgaggtttataacactcacaagaatcctgaaaaaggatgccaaacctccccagcctcagctcccg

SEQ ID NO: 2081 - RNA, 89 nt, synthetic construct
  source 1..89: mol_type = other RNA
acagcttatttggaagctgaaatgtgaggtttataacactcacaagaatcctgaaaaaggatgccaaacgccccaactgtgatgacctg

SEQ ID NO: 2082 - RNA, 89 nt, synthetic construct
  source 1..89: mol_type = other RNA
acagcttatttggaagctgaaatgtgaggtttataacactcacaagaatcctgaaaaaggatgccaaacccccccagcacccatggggc

SEQ ID NO: 2083 - RNA, 89 nt, synthetic construct
  source 1..89: mol_type = other RNA
acagcttatttggaagctgaaatgtgaggtttataacactcacaagaatcctgaaaaaggatgccaaaccaaaacagctgccaacctgc

SEQ ID NO: 2084 - RNA, 20 nt, synthetic construct
  source 1..20: mol_type = other RNA
accctgcatgaagctgagaa

SEQ ID NO: 2085 - RNA, 20 nt, synthetic construct
  source 1..20: mol_type = other RNA
ggatttggaccctgaggtca

SEQ ID NO: 2086 - RNA, 20 nt, synthetic construct
  source 1..20: mol_type = other RNA
gtacaagagatagaaagacc

SEQ ID NO: 2087 - RNA, 89 nt, synthetic construct
  source 1..89: mol_type = other RNA
acagcttatttggaagctgaaatgtgaggtttataacactcacaagaatcctgaaaaaggatgccaaacaccctgcatgaagctgagaa

SEQ ID NO: 2088 - RNA, 89 nt, synthetic construct
  source 1..89: mol_type = other RNA
acagcttatttggaagctgaaatgtgaggtttataacactcacaagaatcctgaaaaaggatgccaaacggatttggaccctgaggtca

SEQ ID NO: 2089 - RNA, 89 nt, synthetic construct
  source 1..89: mol_type = other RNA
acagcttatttggaagctgaaatgtgaggtttataacactcacaagaatcctgaaaaaggatgccaaacgtacaagagatagaaagacc

SEQ ID NO: 2090 - protein, 717 aa, synthetic construct
MIKPTVSQFLTPGFKLIRNHSRTAGRKLKNEGEEACKKFVRENEIPKDECPNFQGGPAIANIIAKSREFTEWEIYQSSLAIQEVIFTLPKDKLPEPILKEEWRAQWLSEHGLDTVPYKEAAGLNLIIKNAVNTYKGVQVKVDNKNKNNLAKINRKNEIAKLNGEQEISFEEIKAFDDKGYLLQKPSPNKSIYCYQSVSPKPFITSKYHNVNLPEEYIGYYRKSNEPIVSPYQFDRLRIPIGEPGYVPKWQYTFLSKKENKRRKLSKRIKNVSPILGIICIKKDWCVFDMRGLLRTNHWKKYHKPTDSINDLFDYFTGDPVIDTKANVVRFRYKMENGIVNYKPVREKKGKELLENICDQNGSCKLATVDVGQNNPVAIGLFELKKVNGELTKTLISRHPTPIDFCNKITAYRERYDKLESSIKLDAIKQLTSEQKIEVDNYNNNFTPQNTKQIVCSKLNINPNDLPWDKMTSGTHFISEKAQVSNKSEIYFTSTDKGKTKDVMKSDYKWFQDYKPKLSKEVRDALSDIEWRLRRESLEFNKLSKSREQDARQLANWISSMCDVIGIENLVKKNNFFGGSGKREPGWDNFYKPKKENRWWINAIHKALTELSQNKGKRVILLPAMRTSITCPKCKYCDSKNRNGEKFNCLKCGIELNADIDVATENLATVAITAQSMPKPTCERSGDAKKPVRARKAKAPEFHDKLAPSYTVVLREAV

SEQ ID NO: 2091 - protein, 717 aa, synthetic construct
MIKPTVSQFLTPGFKLIRNHSRTAGLKLKNEGEEACKKFVRENEIPKDECPNFQGGPAIANIIAKSREFTEWEIYQSSLAIQEVIFTLPKDKLPEPILKEEWRAQWLSEHGLDTVPYKEAAGLNLIIKNAVNTYKGVQVKVDNKNKNNLAKINRKNEIAKLNGEQEISFEEIKAFDDKGYLLQKPSPNKSIYCYQSVSPKPFITSKYHNVNLPEEYIGYYRKSNEPIVSPYQFDRLRIPIGEPGYVPKWQYTFLSKKENKRRKLSKRIKNVSPILGIICIKKDWCVFDMRGLLRTNHWKKYHKPTDSINDLFDYFTGDPVIDTKANVVRFRYKMENGIVNYKPVREKKGKELLENICDQNGSCKLATVDVGQNNPVAIGLFELKKVNGELTKTLISRHPTPIDFCNKITAYRERYDKLESSIKLDAIKQLTSEQKIEVDNYNNNFTPQNTKQIVCSKLNINPNDLPWDKMTSGTHFISEKAQVSNKSEIYFTSTDKGKTKDVMKSDYKWFQDYKPKLSKEVRDALSDIEWRLRRESLEFNKLSKSREQDARQLANWISSMCDVIGIENLVKKNNFFGGSGKREPGWDNFYKPKKENRWWINAIHKALTELSQNKGKRVILLPAMRTSITCPKCKYCDSKNRNGEKFNCLKCGIELNADIDVATENLATVAITAQSMPKPTCERSGDAKKPVRARKAKAPEFHDKLAPSYTVVLREAV

SEQ ID NO: 2092 - RNA, 2641 nt, synthetic construct
  source 1..2641: mol_type = other RNA
agggtcccgcagtcggcgtccagcggctctgcttgttcgtgtgtgtgtcgttgcaggccttattcggatccgccaccatggccccaaagaagaagcggaaggtcggtatccacggagtcccagcagccatcaaacctaccgtgagccagttcctgacccctggcttcaagctgatccggaaccacagccggaccgctggcagaaagcttaagaatgaaggcgaggaagcctgcaaaaagttcgtgagagaaaacgagatccctaaggacgagtgccccaacttccagggcggccctgccatcgctaatattatcgccaagagcagagagttcaccgagtgggagatctatcagagcagcctggccattcaggaggtgatcttcacgctgccaaaggacaagctgcccgagccaatactgaaggaagagtggcgggcccagtggctgtccgagcacggcctggataccgtgccatacaaggaggccgcgggcctgaacctgatcatcaagaacgccgtaaacacctacaagggcgtgcaggtgaaggtggataacaaaaacaagaacaacctggcaaaaatcaacagaaagaacgagatcgccaagctgaatggcgagcaggagatcagctttgaggaaatcaaagccttcgacgataagggctacctgctgcagaaaccatctcctaacaagagcatctattgttaccagagcgtgagccccaagcctttcatcacaagcaagtaccacaacgtgaacctgcccgaggagtacatcggctactacagaaagtctaatgagcctatcgtgagcccttaccagtttgacagactgcggatccctatcggcgaacccggatatgtgcctaagtggcagtacaccttcctgtctaaaaaggaaaacaagcggagaaagctgtccaagcgcatcaagaacgtgagccccatcctgggcatcatctgtatcaagaaagactggtgcgtttttgacatgcgcggcctgctgagaacaaaccactggaagaagtaccataagcctacagatagcattaacgacctgtttgattatttcaccggcgaccctgtgatcgacacaaaggccaacgtcgtgagattcaggtacaagatggaaaatggaatcgtgaactacaagccagtcagagagaagaagggcaaggaactgctggaaaatatctgcgatcagaacggtagctgcaagctggccacagtggacgtgggccagaacaaccccgtggccatcggactgttcgagctcaagaaggtcaatggtgagctgaccaagacactgatctctcggcaccccacacctatcgacttctgtaacaaaatcaccgcctaccgggagagatacgacaagctggaaagcagcatcaaactcgacgccatcaagcagctgacatctgagcagaagatcgaggtggacaactacaacaataacttcacccctcagaacaccaagcaaatcgtgtgcagcaagctgaacattaaccctaacgatctgccttgggataagatgaccagcggcacacacttcatctctgaaaaggctcaggtgagcaacaagtctgaaatctactttaccagcaccgacaagggcaagaccaaagacgtgatgaagtccgattacaagtggttccaagactacaagcctaaactgagcaaagaggtgagagatgccctgagcgacattgagtggcgcctgcggcgggaatctctggaatttaacaaactttccaagagcagagagcaagacgctagacagctggccaattggatcagcagcatgtgcgatgtgatcggcatcgagaacctggtgaagaaaaacaattttttcggcggatctggcaaacgggaacctggatgggacaacttctacaagcccaaaaaggaaaacagatggtggatcaacgccatccacaaagccctgaccgagctgagccagaacaagggcaagagagtgatcctgctgcccgccatgagaaccagcatcacctgccctaaatgcaagtactgcgacagcaaaaacagaaacggcgaaaagttcaattgcctgaagtgtggaatcgagctgaacgctgacatcgatgtggcaaccgaaaacctggctacagttgccatcaccgcccaatccatgcctaaacccacatgtgaaaggtccggcgacgccaagaagcctgtgagagccagaaaggccaaggctcctgagttccacgacaaactggcccctagctacaccgtggtgctgagagaggccgtgaaaaggccggcggccacgaaaaaggccggccaggcaaaaaagaaaaagtaatgaccatcacatttaaaagcatctcagcctaccatgagaataagagaaagaaaatgaagatcaatagcttattcatctctttttctttttcgttggtgtaaagccaacaccctgtctaaaaaacataaatttctttaatcattttgcctcttttctctgtgcttcaattaataaaaaatggaaagaacctcgagaaaaaaaaaaaaaaaaaaaaaaaaaaaaaaaaaaaaaaaaaaaaaaaaaaaaaaaaaaaaaaaaaaaaaaaaaaaaaaaaaaaaaaaaaaaaaaaaaaaaaaaaaaaaaaaaaaaaaaaa

SEQ ID NO: 2093 - protein, 749 aa, synthetic construct
MAPKKKRKVGIHGVPAAIKPTVSQFLTPGFKLIRNHSRTAGRKLKNEGEEACKKFVRENEIPKDECPNFQGGPAIANIIAKSREFTEWEIYQSSLAIQEVIFTLPKDKLPEPILKEEWRAQWLSEHGLDTVPYKEAAGLNLIIKNAVNTYKGVQVKVDNKNKNNLAKINRKNEIAKLNGEQEISFEEIKAFDDKGYLLQKPSPNKSIYCYQSVSPKPFITSKYHNVNLPEEYIGYYRKSNEPIVSPYQFDRLRIPIGEPGYVPKWQYTFLSKKENKRRKLSKRIKNVSPILGIICIKKDWCVFDMRGLLRTNHWKKYHKPTDSINDLFDYFTGDPVIDTKANVVRFRYKMENGIVNYKPVREKKGKELLENICDQNGSCKLATVDVGQNNPVAIGLFELKKVNGELTKTLISRHPTPIDFCNKITAYRERYDKLESSIKLDAIKQLTSEQKIEVDNYNNNFTPQNTKQIVCSKLNINPNDLPWDKMTSGTHFISEKAQVSNKSEIYFTSTDKGKTKDVMKSDYKWFQDYKPKLSKEVRDALSDIEWRLRRESLEFNKLSKSREQDARQLANWISSMCDVIGIENLVKKNNFFGGSGKREPGWDNFYKPKKENRWWINAIHKALTELSQNKGKRVILLPAMRTSITCPKCKYCDSKNRNGEKFNCLKCGIELNADIDVATENLATVAITAQSMPKPTCERSGDAKKPVRARKAKAPEFHDKLAPSYTVVLREAVKRPAATKKAGQAKKKK

1. A composition or system comprising a guide ribonucleic acid (RNA) or a polynucleotide encoding the same, wherein the guide RNA comprises:
a) a first region comprising a protein binding sequence, and
b) a second region comprising a targeting sequence that is complementary to a target sequence that is within an APOC3 gene,
wherein the targeting sequence comprises a nucleotide sequence that is at least 70%, at least 75%, at least 80%, at least 85%, at least 90%, at least 95% or 100% identical to any one of SEQ ID NOs: 1-15, 67-72, 207, 209-299, 804-805, 823-825, 830-1399, 2018-2026, and 2084-2086.

2. The composition of claim 1, wherein the targeting sequence is selected from SEQ ID NOs: 1-15, 67-72, 207, 209-299, 804-805, 823-825, 830-1399, 2018-2026, and 2084-2086.

3. The composition of claim 1, wherein:
a) the targeting sequence comprises a nucleotide sequence that is at least 70%, at least 75%, at least 80%, at least 85%, at least 90%, at least 95% or 100% identical to any one of SEQ ID NOs: 1-15, 67-72, 207, 804-805, and 830-999, and
b) the protein binding sequence comprises a nucleotide sequence that is at least 70%, at least 75%, at least 80%, at least 85%, at least 90%, at least 95% or 100% identical to any one of SEQ ID NOs: 16 and 38-43.

4. The composition or system of claim 3, wherein the composition or system comprises an effector protein or a nucleic acid encoding the same, wherein the effector protein comprises an amino acid sequence that is at least 70%, at least 75%, at least 80%, at least 85%, at least 90%, at least 95%, at least 97%, at least 98%, at least 99%, or 100% identical to any one of SEQ ID NOs: 32, 34, 794, or 2090.

5. The composition or system of claim 4, wherein the effector protein comprises an amino acid alteration relative to SEQ ID NO: 32 as described in TABLE 18 or TABLE 19.

6. The composition or system of any one of claims 1-5, wherein the guide RNA comprises a nucleotide sequence that is at least 70%, at least 75%, at least 80%, at least 85%, at least 90%, at least 95% or 100% identical to any one of SEQ ID NOs: 17-31, 73-78, 491, 815-816, and 1400-1569.

7. The composition or system of claim 1, wherein
a) the targeting sequence comprises a nucleotide sequence that is at least 70%, at least 75%, at least 80%, at least 85%, at least 90%, at least 95% or 100% identical to any one of SEQ ID NOs: 209-299, 823-825, 1000-1399, 2018-2026, and 2084-2086, and
b) the protein binding sequence comprises a nucleotide sequence that is at least 70%, at least 75%, at least 80%, at least 85%, at least 90%, at least 95% or 100% identical to SEQ ID NO: 488.

8. The composition or system of claim 7, wherein the protein binding sequence further comprises a nucleotide sequence that is at least 70%, at least 75%, at least 80%, at least 85%, at least 90%, at least 95% or 100% identical to SEQ ID NOs: 489 or 490.

9. The composition or system of claim 7 or claim 8, wherein the composition or system comprises an effector protein or a nucleic acid encoding the same, wherein the effector protein comprises an amino acid sequence that is at least 70%, at least 75%, at least 80%, at least 85%, at least 90%, at least 95%, at least 97%, at least 98%, at least 99%, or 100% identical to any one of SEQ ID NOs: 773, 775, or 793.

10. The composition or system of claim 9, wherein the effector protein comprises an amino acid alteration relative to SEQ ID NO: 773 as described in TABLE 16 or TABLE 17.

11. The composition or system of any one of claims 1 and 6-10, wherein the guide RNA comprises a nucleotide sequence that is at least 70%, at least 75%, at least 80%, at least 85%, at least 90%, at least 95%, or 100% identical to any one of SEQ ID NOs: 494-584, 826-828, 1570-1969, 2075-2083, and 2087-2089.

12. The composition or system of claim 1, wherein:
a) the first region comprises a nucleotide sequence that is at least 70%, at least 75%, at least 80%, at least 85%, at least 90%, at least 95%, or 100% identical to SEQ ID NO: 39, and
b) a second region comprising a nucleotide sequence that is at least 70%, at least 75%, at least 80%, at least 85%, at least 90%, at least 95%, or 100% identical to SEQ ID NO: 10.

13. The composition or system of claim 12, wherein the guide RNA comprises a nucleotide sequence that is at least 70%, at least 75%, at least 80%, at least 85%, at least 90%, at least 95%, or 100% identical to SEQ ID NO: 26.

14. The composition or system of claim 1, wherein:
a) the first region comprises a nucleotide sequence that is at least 70%, at least 75%, at least 80%, at least 85%, at least 90%, at least 95%, or 100% identical to SEQ ID NO: 39, and
b) a second region comprising a nucleotide sequence that is at least 70%, at least 75%, at least 80%, at least 85%, at least 90%, at least 95%, or 100% identical to SEQ ID NO: 71.

15. The composition or system of claim 14, wherein the guide RNA comprises a nucleotide that is at least 70%, at least 75%, at least 80%, at least 85%, at least 90%, at least 95%, or 100% identical to SEQ ID NO: 77.

16. The composition or system of any one of claims 12-15, comprising an effector protein or a nucleic acid encoding the same, wherein the effector protein comprises an amino acid sequence at least 70%, at least 75%, at least 80%, at least 85%, at least 90%, at least 95%, or 100% identical to any one of SEQ ID NOs: 32, 34, 794, or 2090.

17. The composition or system of any one of claims 4, 8 and 14, wherein the nucleic acid encoding the effector protein comprises a messenger RNA.

18. The composition or system of any one of claims 4, 9, 15, and 17, wherein the effector protein is fused to a fusion partner protein or wherein the nucleic acid encoding the effector protein encodes a fusion partner protein that is fused to the effector protein upon expression of the nucleic acid.

19. The composition or system of claim 18, wherein the fusion partner protein comprises an enzymatic activity is selected from reverse transcriptase activity, deaminase activity, and methyltransferase activity.

20. The composition or system of any one of claims 1-19, further comprising a lipid nanoparticle (LNP), wherein the LNP contains the guide nucleic acid, and optionally, the effector protein or nucleic acid encoding the same.

21. A composition or system comprising an expression cassette comprising, from 5′ to 3′:
a) a first inverted terminal repeat (ITR);
b) a first promoter sequence operably linked to a nucleic acid sequence encoding a guide RNA wherein the guide RNA comprises:
i. a first region comprising a protein binding sequence; and
ii. a second region comprising a spacer sequence that is complementary to a target sequence of an APOC3 gene, wherein the spacer sequence is at least 70%, at least 75%, at least 80%, at least 85%, at least 90%, at least 95%, or 100% identical to any one of SEQ ID NOs: 1-15, 67-72, 207, 209-299, 804-805, 823-825, 830-1399, 2018-2026, and 2084-2086;
c) a second promoter sequence operably linked to a nucleic acid sequence encoding an effector protein, wherein the effector protein comprises an amino acid sequence that is at least 70%, at least 75%, at least 80%, at least 85%, at least 90%, at least 95%, or 100% identical to an amino acid sequence selected from SEQ ID NOs: 32 and 773;
d) a poly(A) signal; and
e) a second ITR.

22. The composition or system of claim 21, wherein the expression cassette is an adeno-associated virus (AAV) vector or portion thereof.

23. A pharmaceutical composition comprising the composition of any one of claims 1-22, and a pharmaceutical acceptable excipient or carrier.

24. A method of modifying an APOC3 gene, comprising contacting the APOC3 gene, with the composition or system of any one of claims 1-23.

25. The method of claim 24, wherein modifying the APOC3 gene reduces the expression of the APOC3 gene.

26. The method of claim 24, wherein modifying the APOC3 gene permanently reduces the expression of the APOC3 gene.

27. The method of any one of claims 24-26, wherein modifying the APOC3 gene comprises cleaving at least one strand of the APOC3 gene.

28. The method of any one of claims 24-27, comprising modifying the APOC3 gene in vivo.

29. The method of claim 28, comprising modifying the APOC3 gene in the liver.

30. A method of lowering triglycerides in a mammal with hypertriglyceridemia, the method comprising delivering a composition to the mammal, wherein the composition comprises:
a) a guide nucleic acid comprising a nucleotide sequence that is at least 70%, at least 75%, at least 80%, at least 85%, at least 90%, at least 95%, or 100% identical to a nucleotide sequence selected from any one of SEQ ID NOs: 1-31, 38-43, 67-202, 207-772, 779-820, and 820-2089; and
b) an effector protein or nucleic acid encoding the same, wherein the effector protein comprises an amino acid sequence that is at least 70%, at least 75%, at least 80%, at least 85%, at least 90%, at least 95%, or 100% identical to a nucleotide sequence selected from any one of SEQ ID NOs: 32 and 773.

31. The method of claim 30, wherein the guide nucleic acid and the effector protein or nucleic acid encoding the same are delivered in an LNP.

32. A method of treating or preventing a disease in a subject in need thereof, comprising administering the composition or system of any one of claims 1-23.

33. The method of claim 32, wherein the disease is selected from cardiovascular disease, familial chylomicronemia syndrome, and hypertriglyceridemia.

34. A cell, or population of cells, comprising, or modified by, the composition, system, or method of any one of claims 1-33.

35. The cell or population of cells of claim 34, wherein the cell is a human cell.
